(19) United States
(12) Patent Application Publication
(10) Pub. No.: US 2015/0010529 A1
(43) Pub. Date: Jan. 8, 2015

(54) THERMALLY STABLE PH20 HYALURONIDASE VARIANTS AND USES THEREOF

(71) Applicant: Ge Wei, San Diego, CA (US)

(72) Inventor: Ge Wei, San Diego, CA (US)

(21) Appl. No.: 14/323,932

(22) Filed: Jul. 3, 2014

Related U.S. Application Data
(60) Provisional application No. 61/957,567, filed on Jul. 3, 2013.

(51) Int. Cl. C12N 9/26; A61K 38/47; C12Q 1/34; A61K 45/06

(52) U.S. Cl. CPC C12N 9/2474; A61K 45/06; A61K 38/47; C12Q 1/34; C12Y 302/01035
USPC 424/94.62; 536/23.2; 435/201; 435/188; 435/320.1; 435/358; 435/18

(57) ABSTRACT

Modified PH20 hyaluronidase polypeptides that exhibit stability and activity under thermal stress conditions are provided. Also provided are compositions and formulations and uses thereof.

### RELATED APPLICATIONS

[0001] Benefit of priority is claimed to U.S. Provisional Application Ser. No. 61/957,567, to Ge Wei, entitled “Thermally Stable PH20 Hyaluronidase Variants And Uses Thereof,” filed Jul. 3, 2013.

[0002] This application is related to International PCT Application Serial No. (Attorney Docket No. 33320.03115.WO02/3115PC), filed the same day herewith, entitled “Thermally Stable PH20 Hyaluronidase Variants and Uses Thereof,” which claims priority to U.S. Provisional Application Ser. No. 61/957,567. This application also is related to Taiwanese Patent Application Serial No. 103122815 (Attorney Docket No. 33320.03115.TW02/3115TW), filed Jul. 2, 2014, entitled “Thermally Stable PH20 Hyaluronidase Variants and Uses Thereof,” which claims priority to U.S. Provisional Application Ser. No. 61/957,567.

[0003] The subject matter of each of the above-noted applications are incorporated by reference in its entirety.

### INCORPORATION BY REFERENCE OF SEQUENCE LISTING PROVIDED ELECTRONICALLY

[0004] An electronic version of the Sequence Listing is filed herewith, the contents of which are incorporated by reference in their entirety. The electronic file was created on Jul. 3, 2014 is 1.75 megabytes in size, and titled 3115seq001.txt.

### FIELD OF THE INVENTION

[0005] Modified PH20 hyaluronidase polypeptides that exhibit stability and activity under thermal stress conditions are provided. Also provided are compositions and formulations and uses thereof

### BACKGROUND

[0006] Hyaluronan (hyaluronic acid; HA) is a polypeptide that occurs in the extracellular matrix of many cells, especially in soft connective tissues. HA also occurs predominantly in skin, cartilage and in synovial fluid in mammals. Hyaluronan is the main constituent of the vitreous of the eye. HA has a role in various physiological processes, such as in water and plasma protein homeostasis (Laurent T C et al. (1992) FASEB J 6: 2397-2404). Certain diseases are associated with expression and/or production and/or accumulation of hyaluronan.

[0007] Hyaluronan-degrading enzymes, such as hyaluronidases, are enzymes that degrade hyaluronan. By catalyzing HA degradation, hyaluronan-degrading enzymes (e.g., hyaluronidases) can be used to treat diseases or disorders associated with accumulation of HA or other glycosaminoglycans. HA is a major component of the interstitial barrier, hyaluronan-degrading enzymes (e.g., hyaluronidase) increase tissue permeability and therefore can be used to increase the dispersion and delivery of therapeutic agents. Various hyaluronidases have been used therapeutically (e.g., Hydase™, Vitrase™ and Wydase™ hyaluronidases), typically as dispersing and spreading agents in combination with other therapeutic agents. Improved hyaluronan-degrading enzymes, such as hyaluronidases, and compositions containing such enzymes that can be used for treatment are needed.

### SUMMARY

[0008] Provided herein are modified PH20 polypeptide designated uber-thermophiles that exhibit thermal stability. The modified PH20 polypeptides provided herein contain an amino acid replacement in an unmodified PH20 polypeptide, whereby the polypeptide retains at least 50% of its hyaluronidase activity after incubation at 52° C. for 10 minutes compared to its hyaluronidase activity after incubation at 4° C. for 10 minutes. For example, the modified PH20 polypeptide contains an amino acid replacement(s) in an unmodified PH20 polypeptide that consists of the sequence of amino acids set forth in SEQ ID NO: 7 or is a C-terminal truncated fragment thereof that is a soluble PH20 polypeptide or a sequence of amino acids that has at least 85% sequence identity to SEQ ID NO:7 or a C-terminal truncated fragment thereof that is soluble. Included among the modified PH20 polypeptides provided herein are those that retain at least 60%, 65%, 70%, 75%, 80%, 85%, 90%, 95% or more of its hyaluronidase activity after incubation at 52° C. for 10 minutes compared to its hyaluronidase activity after incubation at 4° C. for 10 minutes.

[0009] For example, any of the modified PH20 polypeptides provided herein contain at least one amino acid replacement at an amino acid position corresponding to a position selected from among 10, 11, 13, 15, 26, 27, 28, 29, 30, 31, 32, 33, 34, 36, 37, 38, 39, 41, 46, 47, 48, 49, 50, 58, 60, 67, 69, 72, 73, 83, 84, 86, 87, 90, 92, 93, 94, 97, 98, 99, 102, 105, 114, 118, 120, 131, 132, 135, 138, 139, 141, 142, 143, 144, 146, 147, 148, 150, 151, 152, 154, 155, 156, 158, 159, 160, 161, 162, 163, 165, 170, 174, 195, 196, 197, 198, 202, 204, 205, 206, 208, 213, 215, 219, 220, 222, 234, 235, 237, 240, 247, 251, 255, 259, 260, 261, 263, 265, 271, 276, 277, 278, 282, 284, 285, 290, 292, 305, 306, 309, 310, 311, 315, 317, 318, 320, 321, 328, 342, 343, 349, 359, 368, 369, 371, 373, 374, 375, 376, 377, 379, 380, 388, 389, 393, 399, 401, 403, 406, 407, 410, 412, 413, 415, 417, 419, 421, 428, 431, 433, 434, 435, 438, 439, 440, 441, 442, 443, 445, 446 and 447, with reference to amino acid positions of the sequence set forth in SEQ ID NO:3, wherein corresponding amino acid positions are identified by alignment of the PH20 polypeptide with the polypeptide set forth in SEQ ID NO:3.

[0010] In particular examples, any of the modified PH20 polypeptides provided herein contain an amino acid replacement that is:

[0011] at a position corresponding to position 10, replacement with G or N;

[0012] at a position corresponding to position 11, replacement with G;

[0013] at a position corresponding to position 13, replacement with H;

[0014] at a position corresponding to position 15, replacement with A or V;

[0015] at a position corresponding to position 26, replacement with P, R, S, V, W or Y;

[0016] at a position corresponding to position 27, replacement with E or H;

[0017] at a position corresponding to position 28, replacement with L;

[0018] at a position corresponding to position 29, replacement with E, H, L, S or W;

[0019] at a position corresponding to position 30, replacement with A, P or R;

[0020] at a position corresponding to position 31, replacement with C, G or L;

[0021] at a position corresponding to position 32, replacement with Q, S, V or W;

[0022] at a position corresponding to position 33, replacement with G, M, R or W;

[0023] at a position corresponding to position 34, replacement with E, H or W;

[0024] at a position corresponding to position 36, replacement with G;

[0025] at a position corresponding to position 37, replacement with I or K;

[0026] at a position corresponding to position 38, replacement with Y;

[0027] at a position corresponding to position 39, replacement with Q, R or T;

[0028] at a position corresponding to position 41, replacement with D, T or W;

[0029] at a position corresponding to position 46, replacement with H;

[0030] at a position corresponding to position 47, replacement with G or R;

[0031] at a position corresponding to position 48, replacement with G or Y;

[0032] at a position corresponding to position 49, replacement with I;

[0033] at a position corresponding to position 50, replacement with C or D;

[0034] at a position corresponding to position 58, replacement with K or R;

[0035] at a position corresponding to position 60, replacement with K;

[0036] at a position corresponding to position 67, replacement with F;

[0037] at a position corresponding to position 69, replacement with A or Y;

[0038] at a position corresponding to position 72, replacement with D;

[0039] at a position corresponding to position 73, replacement with T;

[0040] at a position corresponding to position 83, replacement with G, Q or V;

[0041] at a position corresponding to position 84, replacement with D;

[0042] at a position corresponding to position 86, replacement with D, E, N or R;

[0043] at a position corresponding to position 87, replacement with M, P or V;

[0044] at a position corresponding to position 90, replacement with E, T or W;

[0045] at a position corresponding to position 92, replacement with V;

[0046] at a position corresponding to position 93, replacement with E or S;

[0047] at a position corresponding to position 94, replacement with N;

[0048] at a position corresponding to position 97, replacement with E or F;

[0049] at a position corresponding to position 98, replacement with M;

[0050] at a position corresponding to position 99, replacement with S;

[0051] at a position corresponding to position 102, replacement with H or N;

[0052] at a position corresponding to position 105, replacement with I, R or W;

[0053] at a position corresponding to position 114, replacement with G;

[0054] at a position corresponding to position 118, replacement with M;

[0055] at a position corresponding to position 120, replacement with S;

[0056] at a position corresponding to position 131, replacement with C or L;

[0057] at a position corresponding to position 132, replacement with A or C;

[0058] at a position corresponding to position 135, replacement with Q;

[0059] at a position corresponding to position 138, replacement with W;

[0060] at a position corresponding to position 139, replacement with R or V;

[0061] at a position corresponding to position 141, replacement with M, Q, W or Y;

[0062] at a position corresponding to position 142, replacement with Q;

[0063] at a position corresponding to position 143, replacement with K;

[0064] at a position corresponding to position 144, replacement with G;

[0065] at a position corresponding to position 146, replacement with V;

[0066] at a position corresponding to position 147, replacement with G, I or M;

[0067] at a position corresponding to position 148, replacement with C, H or K;

[0068] at a position corresponding to position 150, replacement with L;

[0069] at a position corresponding to position 151, replacement with Q;

[0070] at a position corresponding to position 152, replacement with A, I, M or T;

[0071] at a position corresponding to position 154, replacement with R;

[0072] at a position corresponding to position 155, replacement with A, D, F, H, L, R, S or V;

[0073] at a position corresponding to position 156, replacement with A, C or Q;

[0074] at a position corresponding to position 158, replacement with H;

[0075] at a position corresponding to position 159, replacement with A, H, N, Q or S;

[0076] at a position corresponding to position 160, replacement with Y;

[0077] at a position corresponding to position 161, replacement with A or D;

[0078] at a position corresponding to position 162, replacement with L;

[0079] at a position corresponding to position 163, replacement with K, R or S;

[0080] at a position corresponding to position 165, replacement with F;

[0081] at a position corresponding to position 170, replacement with R;

[0082] at a position corresponding to position 174, replacement with W;

[0083] at a position corresponding to position 195, replacement with H, L or N;

[0084] at a position corresponding to position 196, replacement with T;

[0085] at a position corresponding to position 197, replacement with F;

[0086] at a position corresponding to position 198, replacement with L;

[0087] at a position corresponding to position 202, replacement with M;

[0088] at a position corresponding to position 204, replacement with P;

[0089] at a position corresponding to position 205, replacement with A, E, K, L, P, S or T;

[0090] at a position corresponding to position 206, replacement with I;

[0091] at a position corresponding to position 208, replacement with L, Q or R;

[0092] at a position corresponding to position 213, replacement with E or N;

[0093] at a position corresponding to position 215, replacement with A, D, E, H, T, V or W;

[0094] at a position corresponding to position 219, replacement with A, R, S or T;

[0095] at a position corresponding to position 220, replacement with V;

[0096] at a position corresponding to position 222, replacement with N;

[0097] at a position corresponding to position 234, replacement with M;

[0098] at a position corresponding to position 235, replacement with T;

[0099] at a position corresponding to position 237, replacement with Q;

[0100] at a position corresponding to position 240, replacement with Q;

[0101] at a position corresponding to position 247, replacement with I;

[0102] at a position corresponding to position 251, replacement with L or M;

[0103] at a position corresponding to position 255, replacement with R;

[0104] at a position corresponding to position 259, replacement with K or P;

[0105] at a position corresponding to position 260, replacement with G or M;

[0106] at a position corresponding to position 261, replacement with A or F;

[0107] at a position corresponding to position 263, replacement with T;

[0108] at a position corresponding to position 265, replacement with I;

[0109] at a position corresponding to position 271, replacement with V;

[0110] at a position corresponding to position 276, replacement with E;

[0111] at a position corresponding to position 277, replacement with A, C, E or H;

[0112] at a position corresponding to position 278, replacement with G, H, K or N;

[0113] at a position corresponding to position 282, replacement with G or Q;

[0114] at a position corresponding to position 284, replacement with A, Q or S;

[0115] at a position corresponding to position 285, replacement with M or Y;

[0116] at a position corresponding to position 290, replacement with M;

[0117] at a position corresponding to position 292, replacement with V;

[0118] at a position corresponding to position 305, replacement with D or N;

[0119] at a position corresponding to position 306, replacement with D;

[0120] at a position corresponding to position 309, replacement with E, H or L;

[0121] at a position corresponding to position 310, replacement with Q or R;

[0122] at a position corresponding to position 311, replacement with G or K;

[0123] at a position corresponding to position 315, replacement with T;

[0124] at a position corresponding to position 317, replacement with N;

[0125] at a position corresponding to position 318, replacement with K, M, N or Q;

[0126] at a position corresponding to position 320, replacement with R;

[0127] at a position corresponding to position 321, replacement with A, H or R;

[0128] at a position corresponding to position 328, replacement with L or R;

[0129] at a position corresponding to position 342, replacement with A;

[0130] at a position corresponding to position 343, replacement with V;

[0131] at a position corresponding to position 349, replacement with A or E;

[0132] at a position corresponding to position 359, replacement with E;

[0133] at a position corresponding to position 368, replacement with H or K;

[0134] at a position corresponding to position 369, replacement with H;

[0135] at a position corresponding to position 371, replacement with E, F, M or T;

[0136] at a position corresponding to position 373, replacement with S;

[0137] at a position corresponding to position 374, replacement with A or V;

[0138] at a position corresponding to position 375, replacement with T;

[0139] at a position corresponding to position 376, replacement with Y;

[0140] at a position corresponding to position 377, replacement with T;

[0141] at a position corresponding to position 379, replacement with H, S or T;

[0142] at a position corresponding to position 380, replacement with I, L, P, T or V;

[0143] at a position corresponding to position 388, replacement with H;

[0144] at a position corresponding to position 389, replacement with K;

[0145] at a position corresponding to position 393, replacement with L;

[0146] at a position corresponding to position 399, replacement with R or W;

[0147] at a position corresponding to position 401, replacement with G;

[0148] at a position corresponding to position 403, replacement with F;

[0149] at a position corresponding to position 406, replacement with N;

[0150] at a position corresponding to position 407, replacement with F, H, M, P or Q;

[0151] at a position corresponding to position 410, replacement with S;

[0152] at a position corresponding to position 412, replacement with G, P or S;

[0153] at a position corresponding to position 413, replacement with Q or T;

[0154] at a position corresponding to position 415, replacement with W;

[0155] at a position corresponding to position 417, replacement with L;

[0156] at a position corresponding to position 419, replacement with L;

[0157] at a position corresponding to position 421, replacement with I or M;

[0158] at a position corresponding to position 428, replacement with P;

[0159] at a position corresponding to position 431, replacement with A or G;

[0160] at a position corresponding to position 433, replacement with L or T;

[0161] at a position corresponding to position 434, replacement with I or M;

[0162] at a position corresponding to position 435, replacement with H;

[0163] at a position corresponding to position 438, replacement with A;

[0164] at a position corresponding to position 439, replacement with C or T;

[0165] at a position corresponding to position 440, replacement with M;

[0166] at a position corresponding to position 441, replacement with T or V;

[0167] at a position corresponding to position 442, replacement with P;

[0168] at a position corresponding to position 443, replacement with M;

[0169] at a position corresponding to position 445, replacement with Y;

[0170] at a position corresponding to position 446, replacement with C, D, E or G; or

[0171] at a position corresponding to position 447, replacement with D, E or G, each with reference to amino acid positions of the sequence set forth in SEQ ID NO:3.

[0172] For example, any of the modified PH20 polypeptides provided herein contain at least one amino acid replacement that is replacement with: glycine (G) at a position corresponding to position 11; A at a position corresponding to position 15; V at a position corresponding to position 15; R at a position corresponding to position 26; S at a position corresponding to position 26; E at a position corresponding to position 27; H at a position corresponding to position 27; H at a position corresponding to position 29; S at a position corresponding to position 29; A at a position corresponding to position 30; P at a position corresponding to position 30; G at a position corresponding to position 31; L at a position corresponding to position 31; Q at a position corresponding to position 32; W at a position corresponding to position 32; G at a position corresponding to position 33; M at a position corresponding to position 33; R at a position corresponding to position 33; W at a position corresponding to position 33; E at a position corresponding to position 34; H at a position corresponding to position 34; W at a position corresponding to position 34; K at a position corresponding to position 37; Y at a position corresponding to position 38; Q at a position corresponding to position 39; R at a position corresponding to position 39; T at a position corresponding to position 39; D at a position corresponding to position 41; T at a position corresponding to position 41; W at a position corresponding to position 41; G at a position corresponding to position 48; C at a position corresponding to position 50; D at a position corresponding to position 50; K at a position corresponding to position 58; R at a position corresponding to position 58; K at a position corresponding to position 60; F at a position corresponding to position 67; A at a position corresponding to position 69; Y at a position corresponding to position 69; Q at a position corresponding to position 83; D at a position corresponding to position 84; D at a position corresponding to position 86; E at a position corresponding to position 86; R at a position corresponding to position 86; P at a position corresponding to position 87; W at a position corresponding to position 90; V at a position corresponding to position 92; E at a position corresponding to position 93; S at a position corresponding to position 93; N at a position corresponding to position 94; F at a position corresponding to position 97; M at a position corresponding to position 98; S at a position corresponding to position 99; H at a position corresponding to position 102; G at a position corresponding to position 114; M at a position corresponding to position 118; S at a position corresponding to position 120; C at a position corresponding to position 131; L at a position corresponding to position 131; A at a position corresponding to position 132; W at a position corresponding to position 138; R at a position corresponding to position 139; V at a position corresponding to position 139; M at a position corresponding to position 141; Y at a position corresponding to position 141; K at a position corresponding to position 143; G at a position corresponding to position 144; V at a position corresponding to position 146; I at a position corresponding to position 147; M at a position corresponding to position 147; C at a position corresponding to position 148; H at a position corresponding to position 148; K at a position corresponding to position 148; L at a position corresponding to position 150; Q at a position corresponding to position 151; I at a position corresponding to position 152; M at a position corresponding to position 152; T at a position corresponding to position 152; R at a position corresponding to position 154; A at a position corresponding to position 155; D at a position corresponding to position 155; F at a position corresponding to position 155; H at a position corresponding to position 155; L at a position corresponding to position 155; R at a position corresponding to position 155; S at a position corresponding to position 155; H at a position corresponding to position 158; A at a position corresponding to position 159; H at a position corresponding to position 159; N at a position corresponding to position 159; Q at a position corresponding to position 159; S at a position corresponding to position 159; Y at a position corresponding to position 160; A at a position corresponding to position 161; L at a position corresponding to position 162; K at a position corresponding to position 163; R at a position corresponding to position 163; S at a position corresponding to position 163; F at a position corresponding to position 165; W at a position corresponding to position 174; H at a position corresponding to position 195; L at a position corresponding to position 195; T at a position corresponding to position 196; F at a position corresponding to position 197; L at a position corresponding to position 198; P at a position corresponding to position 204; A at a position corresponding to position 205; E at a position corresponding to position 205; K at a position corresponding to position 205; L at a position corresponding to position 205; T at a position corresponding to position 205; I at a position corresponding to position 206; Q at a position corresponding to position 208; R at a position corresponding to position 208; E at a position corresponding to position 213; N at a position corresponding to position 213; E at a position corresponding to position 215; H at a position corresponding to position 215; T at a position corresponding to position 215; N at a position corresponding to position 222; T at a position corresponding to position 235; Q at a position corresponding to position 237; Q at a position corresponding to position 240; I at a position corresponding to position 247; L at a position corresponding to position 251; M at a position corresponding to position 251; K at a position corresponding to position 259; P at a position corresponding to position 259; M at a position corresponding to position 260; A at a position corresponding to position 261; F at a position corresponding to position 261; T at a position corresponding to position 263; V at a position corresponding to position 271; E at a position corresponding to position 276; A at a position corresponding to position 277; C at a position corresponding to position 277; N at a position corresponding to position 278; Q at a position corresponding to position 282; A at a position corresponding to position 284; Q at a position corresponding to position 284; S at a position corresponding to position 284; M at a position corresponding to position 285; V at a position corresponding to position 292; N at a position corresponding to position 305; D at a position corresponding to position 306; R at a position corresponding to position 310; G at a position corresponding to position 311; T at a position corresponding to position 315; N at a position corresponding to position 317; A at a position corresponding to position 321; R at a position corresponding to position 321; L at a position corresponding to position 328; R at a position corresponding to position 328; A at a position corresponding to position 342; H at a position corresponding to position 368; K at a position corresponding to position 368; H at a position corresponding to position 369; F at a position corresponding to position 371; S at a position corresponding to position 373; T at a position corresponding to position 377; H at a position corresponding to position 379; S at a position corresponding to position 379; T at a position corresponding to position 379; I at a position corresponding to position 380; L at a position corresponding to position 380; P at a position corresponding to position 380; T at a position corresponding to position 380; H at a position corresponding to position 388; N at a position corresponding to position 406; F at a position corresponding to position 407; Q at a position corresponding to position 407; S at a position corresponding to position 410; G at a position corresponding to position 412; P at a position corresponding to position 412; S at a position corresponding to position 412; Q at a position corresponding to position 413; M at a position corresponding to position 421; P at a position corresponding to position 428; A at a position corresponding to position 431; L at a position corresponding to position 433; T at a position corresponding to position 433; A at a position corresponding to position 438; C at a position corresponding to position 439; T at a position corresponding to position 441; M at a position corresponding to position 443; Y at a position corresponding to position 445; C at a position corresponding to position 446; D at a position corresponding to position 446; E at a position corresponding to position 446; G at a position corresponding to position 446; E at a position corresponding to position 447; or G at a position corresponding to position 447, with reference to amino acid residue positions of the sequence set forth in SEQ ID NO:3.

[0173] In examples of any of the modified PH20 polypeptides provided herein, the modified PH20 polypeptide contains only one amino acid replacement compared to the unmodified PH20 polypeptide. In other examples of any of the modified PH20 polypeptides provided herein, the modified PH20 polypeptide contains at least 2, 3, 4, 5, 6, 7, 8, 9, 10, 11, 12, 13, 14, 15, 16, 17, 18, 19 or 20 amino acid replacements compared to the unmodified PH20 polypeptide or contains 2, 3, 4, 5, 6, 7, 8, 9, 10, 11, 12, 13, 14, 15, 16, 17, 18, 19 or 20 amino acid replacements compared to the unmodified PH20 polypeptide.

[0174] For example, included among modified PH20 polypeptides provided herein are any that contain at least 2 amino acid replacements, such as at least 3, 4, 5, 6, 7, 8, 9, 10, 11, 12, 13, 14, 15, 16, 17, 18, 19 or 20 amino acid replacements, where the amino acid replacements are two or more of replacement with: glycine (G) at a position corresponding to position 11; A at a position corresponding to position 15; V at a position corresponding to position 15; R at a position corresponding to position 26; S at a position corresponding to position 26; E at a position corresponding to position 27; H at a position corresponding to position 27; H at a position corresponding to position 29; S at a position corresponding to position 29; A at a position corresponding to position 30; P at a position corresponding to position 30; G at a position corresponding to position 31; L at a position corresponding to position 31; Q at a position corresponding to position 32; W at a position corresponding to position 32; G at a position corresponding to position 33; M at a position corresponding to position 33; R at a position corresponding to position 33; W at a position corresponding to position 33; E at a position corresponding to position 34; H at a position corresponding to position 34; W at a position corresponding to position 34; K at a position corresponding to position 37; Y at a position corresponding to position 38; Q at a position corresponding to position 39; R at a position corresponding to position 39; T at a position corresponding to position 39; D at a position corresponding to position 41; T at a position corresponding to position 41; W at a position corresponding to position 41; G at a position corresponding to position 48; C at a position corresponding to position 50; D at a position corresponding to position 50; K at a position corresponding to position 58; R at a position corresponding to position 58; K at a position corresponding to position 60; F at a position corresponding to position 67; A at a position corresponding to position 69; Y at a position corresponding to position 69; Q at a position corresponding to position 83; D at a position corresponding to position 84; D at a position corresponding to position 86; E at a position corresponding to position 86; R at a position corresponding to position 86; P at a position corresponding to position 87; W at a position corresponding to position 90; V at a position corresponding to position 92; E at a position corresponding to position 93; S at a position corresponding to position 93; N at a position corresponding to position 94; F at a position corresponding to position 97; M at a position corresponding to position 98; S at a position corresponding to position 99; H at a position corresponding to position 102; G at a position corresponding to position 114; M at a position corresponding to position 118; S at a position corresponding to position 120; C at a position corresponding to position 131; L at a position corresponding to position 131; A at a position corresponding to position 132; W at a position corresponding to position 138; R at a position corresponding to position 139; V at a position corresponding to position 139; M at a position corresponding to position 141; Y at a position corresponding to position 141; K at a position corresponding to position 143; G at a position corresponding to position 144; V at a position corresponding to position 146; I at a position corresponding to position 147; M at a position corresponding to position 147; C at a position corresponding to position 148; H at a position corresponding to position 148; K at a position corresponding to position 148; L at a position corresponding to position 150; Q at a position corresponding to position 151; I at a position corresponding to position 152; M at a position corresponding to position 152; T at a position corresponding to position 152; R at a position corresponding to position 154; A at a position corresponding to position 155; D at a position corresponding to position 155; F at a position corresponding to position 155; H at a position corresponding to position 155; L at a position corresponding to position 155; R at a position corresponding to position 155; S at a position corresponding to position 155; H at a position corresponding to position 158; A at a position corresponding to position 159; H at a position corresponding to position 159; N at a position corresponding to position 159; Q at a position corresponding to position 159; S at a position corresponding to position 159; Y at a position corresponding to position 160; A at a position corresponding to position 161; L at a position corresponding to position 162; K at a position corresponding to position 163; R at a position corresponding to position 163; S at a position corresponding to position 163; F at a position corresponding to position 165; W at a position corresponding to position 174; H at a position corresponding to position 195; L at a position corresponding to position 195; T at a position corresponding to position 196; F at a position corresponding to position 197; L at a position corresponding to position 198; P at a position corresponding to position 204; A at a position corresponding to position 205; E at a position corresponding to position 205; K at a position corresponding to position 205; L at a position corresponding to position 205; T at a position corresponding to position 205; I at a position corresponding to position 206; Q at a position corresponding to position 208; R at a position corresponding to position 208; E at a position corresponding to position 213; N at a position corresponding to position 213; E at a position corresponding to position 215; H at a position corresponding to position 215; T at a position corresponding to position 215; N at a position corresponding to position 222; T at a position corresponding to position 235; Q at a position corresponding to position 237; Q at a position corresponding to position 240; I at a position corresponding to position 247; L at a position corresponding to position 251; M at a position corresponding to position 251; K at a position corresponding to position 259; P at a position corresponding to position 259; M at a position corresponding to position 260; A at a position corresponding to position 261; F at a position corresponding to position 261; T at a position corresponding to position 263; Vat a position corresponding to position 271; E at a position corresponding to position 276; A at a position corresponding to position 277; C at a position corresponding to position 277; N at a position corresponding to position 278; Q at a position corresponding to position 282; A at a position corresponding to position 284; Q at a position corresponding to position 284; S at a position corresponding to position 284; M at a position corresponding to position 285; V at a position corresponding to position 292; N at a position corresponding to position 305; D at a position corresponding to position 306; R at a position corresponding to position 310; G at a position corresponding to position 311; T at a position corresponding to position 315; N at a position corresponding to position 317; A at a position corresponding to position 321; R at a position corresponding to position 321; L at a position corresponding to position 328; R at a position corresponding to position 328; A at a position corresponding to position 342; H at a position corresponding to position 368; K at a position corresponding to position 368; H at a position corresponding to position 369; F at a position corresponding to position 371; S at a position corresponding to position 373; T at a position corresponding to position 377; H at a position corresponding to position 379; S at a position corresponding to position 379; T at a position corresponding to position 379; I at a position corresponding to position 380; L at a position corresponding to position 380; P at a position corresponding to position 380; T at a position corresponding to position 380; H at a position corresponding to position 388; N at a position corresponding to position 406; F at a position corresponding to position 407; Q at a position corresponding to position 407; S at a position corresponding to position 410; G at a position corresponding to position 412; P at a position corresponding to position 412; S at a position corresponding to position 412; Q at a position corresponding to position 413; M at a position corresponding to position 421; P at a position corresponding to position 428; A at a position corresponding to position 431; L at a position corresponding to position 433; T at a position corresponding to position 433; A at a position corresponding to position 438; C at a position corresponding to position 439; T at a position corresponding to position 441; M at a position corresponding to position 443; Y at a position corresponding to position 445; C at a position corresponding to position 446; D at a position corresponding to position 446; E at a position corresponding to position 446; G at a position corresponding to position 446; E at a position corresponding to position 447; or G at a position corresponding to position 447, with reference to amino acid residue positions of the sequence set forth in SEQ ID NO:3.

[0175] In any of the above examples of a modified PH20 polypeptide provided herein, the amino acid replacement or amino acid replacements include replacement with: alanine (A) at a position corresponding to position 15; V at a position corresponding to position 15; R at a position corresponding to position 26; E at a position corresponding to position 27; S at a position corresponding to position 29; G at a position corresponding to position 31; L at a position corresponding to position 31; Q at a position corresponding to position 32; G at a position corresponding to position 33; M at a position corresponding to position 33; R at a position corresponding to position 33; W at a position corresponding to position 33; E at a position corresponding to position 34; H at a position corresponding to position 34; Y at a position corresponding to position 38; R at a position corresponding to position 39; W at a position corresponding to position 41; G at a position corresponding to position 48; C at a position corresponding to position 50; R at a position corresponding to position 58; A at a position corresponding to position 69; D at a position corresponding to position 86; E at a position corresponding to position 86; R at a position corresponding to position 86; W at a position corresponding to position 90; E at a position corresponding to position 93; S at a position corresponding to position 93; F at a position corresponding to position 97; S at a position corresponding to position 99; S at a position corresponding to position 120; L at a position corresponding to position 131; A at a position corresponding to position 132; W at a position corresponding to position 138; R at a position corresponding to position 139; V at a position corresponding to position 139; M at a position corresponding to position 141; Y at a position corresponding to position 141; K at a position corresponding to position 143; V at a position corresponding to position 146; I at a position corresponding to position 147; M at a position corresponding to position 147; C at a position corresponding to position 148; H at a position corresponding to position 148; K at a position corresponding to position 148; L at a position corresponding to position 150; Q at a position corresponding to position 151; I at a position corresponding to position 152; M at a position corresponding to position 152; T at a position corresponding to position 152; R at a position corresponding to position 154; A at a position corresponding to position 155; F at a position corresponding to position 155; L at a position corresponding to position 155; R at a position corresponding to position 155; H at a position corresponding to position 158; H at a position corresponding to position 159; N at a position corresponding to position 159; Q at a position corresponding to position 159; S at a position corresponding to position 159; Y at a position corresponding to position 160; R at a position corresponding to position 163; F at a position corresponding to position 165; W at a position corresponding to position 174; L at a position corresponding to position 198; P at a position corresponding to position 204; A at a position corresponding to position 205; L at a position corresponding to position 205; T at a position corresponding to position 205; I at a position corresponding to position 206; Q at a position corresponding to position 208; R at a position corresponding to position 208; N at a position corresponding to position 213; E at a position corresponding to position 215; T at a position corresponding to position 215; T at a position corresponding to position 235; Q at a position corresponding to position 237; Q at a position corresponding to position 240; L at a position corresponding to position 251; K at a position corresponding to position 259; M at a position corresponding to position 260; A at a position corresponding to position 261; F at a position corresponding to position 261; T at a position corresponding to position 263; Vat a position corresponding to position 271; E at a position corresponding to position 276; A at a position corresponding to position 277; C at a position corresponding to position 277; A at a position corresponding to position 284; Q at a position corresponding to position 284; S at a position corresponding to position 284; V at a position corresponding to position 292; N at a position corresponding to position 305; D at a position corresponding to position 306; R at a position corresponding to position 310; T at a position corresponding to position 315; R at a position corresponding to position 328; A at a position corresponding to position 342; K at a position corresponding to position 368; H at a position corresponding to position 369; S at a position corresponding to position 373; H at a position corresponding to position 379; S at a position corresponding to position 379; T at a position corresponding to position 379; I at a position corresponding to position 380; L at a position corresponding to position 380; P at a position corresponding to position 380; T at a position corresponding to position 380; H at a position corresponding to position 388; G at a position corresponding to position 412; P at a position corresponding to position 412; S at a position corresponding to position 412; Q at a position corresponding to position 413; T at a position corresponding to position 433; A at a position corresponding to position 438; T at a position corresponding to position 441; M at a position corresponding to position 443; Y at a position corresponding to position 445; C at a position corresponding to position 446; E at a position corresponding to position 447; or G at a position corresponding to position 447, with reference to positions in SEQ ID NO: 3.

[0176] For example, in any of the above examples of a modified PH20 polypeptide provided herein, the amino acid replacement or amino acid replacements include replacement with: alanine (A) at a position corresponding to position 15; V at a position corresponding to position 15; R at a position corresponding to position 26; E at a position corresponding to position 27; S at a position corresponding to position 29; G at a position corresponding to position 31; G at a position corresponding to position 33; M at a position corresponding to position 33; R at a position corresponding to position 33; W at a position corresponding to position 33; E at a position corresponding to position 34; H at a position corresponding to position 34; Y at a position corresponding to position 38; R at a position corresponding to position 39; G at a position corresponding to position 48; R at a position corresponding to position 86; W at a position corresponding to position 90; E at a position corresponding to position 93; S at a position corresponding to position 93; F at a position corresponding to position 97; S at a position corresponding to position 120; L at a position corresponding to position 131; A at a position corresponding to position 132; R at a position corresponding to position 139; M at a position corresponding to position 141; Y at a position corresponding to position 141; K at a position corresponding to position 143; I at a position corresponding to position 147; M at a position corresponding to position 147; C at a position corresponding to position 148; H at a position corresponding to position 148; K at a position corresponding to position 148; M at a position corresponding to position 152; T at a position corresponding to position 152; R at a position corresponding to position 154; A at a position corresponding to position 155; F at a position corresponding to position 155; L at a position corresponding to position 155; N at a position corresponding to position 159; S at a position corresponding to position 159; Y at a position corresponding to position 160; R at a position corresponding to position 163; F at a position corresponding to position 165; W at a position corresponding to position 174; L at a position corresponding to position 198; P at a position corresponding to position 204; A at a position corresponding to position 205; L at a position corresponding to position 205; T at a position corresponding to position 205; I at a position corresponding to position 206; R at a position corresponding to position 208; N at a position corresponding to position 213; E at a position corresponding to position 215; T at a position corresponding to position 215; Q at a position corresponding to position 240; L at a position corresponding to position 251; K at a position corresponding to position 259; M at a position corresponding to position 260; A at a position corresponding to position 261; F at a position corresponding to position 261; T at a position corresponding to position 263; V at a position corresponding to position 271; A at a position corresponding to position 277; C at a position corresponding to position 277; A at a position corresponding to position 284; Q at a position corresponding to position 284; S at a position corresponding to position 284; V at a position corresponding to position 292; T at a position corresponding to position 315; A at a position corresponding to position 342; H at a position corresponding to position 369; H at a position corresponding to position 379; S at a position corresponding to position 379; T at a position corresponding to position 379; L at a position corresponding to position 380; P at a position corresponding to position 380; T at a position corresponding to position 380; H at a position corresponding to position 388; G at a position corresponding to position 412; P at a position corresponding to position 412; S at a position corresponding to position 412; T at a position corresponding to position 433; A at a position corresponding to position 438; T at a position corresponding to position 441; M at a position corresponding to position 443; Y at a position corresponding to position 445; C at a position corresponding to position 446; E at a position corresponding to position 447; or G at a position corresponding to position 447, with reference to positions in SEQ ID NO: 3.

[0177] In another example, in any of the above examples of a modified PH20 polypeptide provided herein, the amino acid replacement or amino acid replacements include replacement with: glutamic acid (E) at a position corresponding to position 27; A at a position corresponding to position 132; K at a position corresponding to position 143; M at a position corresponding to position 147; C at a position corresponding to position 148; H at a position corresponding to position 148; Y at a position corresponding to position 160; P at a position corresponding to position 204; A at a position corresponding to position 205; I at a position corresponding to position 206; T at a position corresponding to position 215; M at a position corresponding to position 260; A at a position corresponding to position 261; F at a position corresponding to position 261; T at a position corresponding to position 263; A at a position corresponding to position 284; T at a position corresponding to position 315; and S at a position corresponding to position 379, with reference to positions in SEQ ID NO: 3.

[0178] In a further example, in any of the above examples of a modified PH20 polypeptide provided herein, the amino acid replacement or amino acid replacements include replacement with: P at a position corresponding to position 30; R at a position corresponding to position 58; K at a position corresponding to position 60; K at a position corresponding to position 143; I at a position corresponding to position 147; P at a position corresponding to position 204; T at a position corresponding to position 215; T at a position corresponding to position 235; A at a position corresponding to position 261; G at a position corresponding to position 311; T at a position corresponding to position 315; or H at a position corresponding to position 369, with reference to positions in SEQ ID NO: 3.

[0179] In examples herein, in any of the above examples of a modified PH20 polypeptide provided herein, the amino acid replacement or amino acid replacements include replacement with: P at a position corresponding to position 30; K at a position corresponding to position 60; I at a position corresponding to position 147; T at a position corresponding to position 215; T at a position corresponding to position 235; G at a position corresponding to position 311; T at a position corresponding to position 315; or H at a position corresponding to position 369, with reference to positions in SEQ ID NO: 3.

[0180] In any of the above examples, the modified PH20 polypeptide contain an amino acid replacement to amino acid replacements in an unmodified PH20 polypeptide that has the sequence of amino acids set forth in any of SEQ ID NOS: 3, 7, 10, 12, 14, 24, 32-66, 69, 72, 388, 390, 392, or 400 or a sequence of amino acids that is at least 80%, 85%, 86%, 87%, 88%, 89%, 90%, 91%, 92%, 93%, 94%, 95%, 96%, 97%, 98%, 99% identical to any of SEQ ID NOS: 3, 7, 10, 12, 14, 24, 32-66, 69, 72, 388, 390, 392, or 400. For example, the amino acid replacement or replacements is/are in an unmodified PH20 polypeptide that has the sequence of amino acids set forth in SEQ ID NOS: 3, 7, 32-66, 69 or 72, or a sequence of amino acids that exhibits at least 91% sequence identity to any of SEQ ID NOS: 3, 7, 32-66, 69 or 72. The unmodified polypeptide can be a human polypeptide.

[0181] In any of the examples of a modified PH20 polypeptide provided herein, the modified PH20 polypeptide exhibits at least 68% amino acid sequence identity to the sequence of amino acids set forth in SEQ ID NO:3, such as at least 70%, 75%, 80%, 85%, 86%, 87%, 88%, 89%, 90%, 91%, 92%, 93%, 94%, 95%, 96%, 97%, 98% or 99% amino acid sequence identity to the sequence of amino acids set forth in SEQ ID NO:3. Included among any of the modified PH20 polypeptides provided herein are modified PH20 polypeptides that are a mature PH20 polypeptide lacking the signal sequence. In examples herein, the modified PH20 polypeptide does not contain or consist of the sequence of amino acids set forth in any of SEQ ID NOS: 8-31, 69, 72, 387-392, 399 or 400.

[0182] For example, provided herein are a modified PH20 polypeptide containing the sequence of amino acids set forth in any of SEQ ID NOS: 73-386 or a sequence of amino acids that exhibits at least 85%, 90%, 91%, 92%, 93%, 94%, 95%, 96%, 97%, 98%, 99% or more sequence identity to a sequence of amino acids set forth in any of SEQ ID NOS: 73-386.

[0183] In any of the examples of a modified PH20 polypeptides provided herein, the modified PH20 polypeptide is substantially purified or isolated. Any of the modified PH20 polypeptides provided herein exhibit hyaluronidase activity at neutral pH. Any of the modified PH20 polypeptides provided herein include those that are capable of being secreted upon expression from cells and that are soluble in the supernatant. For example, the cell can be a mammalian cell, such as BHK, CHO, Balb/3T3, HeLa, MT2, mouse NS0 (nonsecreting) and other myeloma cell lines, hybridoma and heterohybridoma cell lines, lymphocytes, fibroblasts, Sp2/0, COS, NIH3T3, HEK293, 293S, 2B8, or HKB cells.

[0184] Included among any of the modified PH20 polypeptides provided herein are any that are modified by or contain one or more of glycosylation, sialation, albumination, farnysylation, carboxylation, hydroxylation or phosphorylation. For example, the modified PH20 polypeptide is glycosylated, whereby the polypeptide has at least an N-acetylglucosamine moiety linked to each of at least three asparagine (N) residues, such as asparagine residues that correspond to amino acid residues 200, 333 and 358 of SEQ ID NO:3.

[0185] Also included among any of the modified PH20 polypeptides provided herein are any that are conjugated to a polymer, such as a dextran or PEG or to a moiety that is a multimerization domain, toxin, detectable label or drug. For example, the modified PH20 polypeptide is conjugated to an Fc domain. Also provided herein are conjugates containing any of the modified PH20 polypeptides provided herein linked directly or indirectly via a linker to a targeting agent.

[0186] Provided herein are nucleic acid molecules encoding any of the modified PH20 polypeptide provided herein. Also provided are vectors containing any of the nucleic acids provided herein. The vector can be eukaryotic or a prokaryotic vector, such as a mammalian vector or a viral vector. For example, the vector is an adenovirus vector, a retrovirus vector or a vaccinia virus vector. Also provided herein are cells containing any of the vectors provided herein. The cell can be a mammalian cell or non-mammalian cell. For example, the cell is a mammalian cell, such as a Chinese Hamster Ovary (CHO) cell.

[0187] Provided herein is a method of producing a modified PH20 polypeptide that is an uber-thermophile by introducing any of the nucleic acids or vectors provided herein into a cell capable of incorporating N-linked sugar moieties into the polypeptide, culturing the cell under conditions whereby an encoded modified PH20 polypeptide is produced and secreted by the cell; and recovering the expressed PH20 polypeptide. In such a method, the nucleic acid is operably linked to a promoter. The cell can be a eukaryotic cell or a prokaryotic cell. Typically, the cell is a cell capable of glycosylation. For example, the cell is a mammalian cell, such as a Chinese hamster ovary (CHO) cell. Also provided herein are modified PH20 polypeptides produced by the above method.

[0188] Provided herein are pharmaceutical compositions containing any of the modified PH20 polypeptides provided herein. The pharmaceutical composition can contain a pharmaceutically acceptable excipient. The modified PH20 polypeptide in the any of the pharmaceutical compositions provided herein exhibits greater than 75%, 80%, 85%, 90%, 95% or more of its hyaluronidase when stored without refrigeration for greater than 48 hours compared to when it stored with refrigeration for the same time period. For example, the activity is exhibited when stored without refrigeration for greater than 72 hours, 96 hours, one week, two weeks, three weeks, one month, two months, three months, four months, five months or six months compared to when it is stored with refrigeration for the same time period. In such examples, storing the composition without refrigeration exposes the composition to an ambient temperature that is between 18° C. to 45° C., 25° C. to 42° C. or 30° C. to 37° C. for the time period, including time periods that are continuous, intermittent or variable.

[0189] In any of the examples of a pharmaceutical composition provided herein, the pharmaceutical composition is formulated in the absence of a stabilizer that is an amino acid, an amino acid derivative, an amine, a sugar, a polyol, a surfactant, a preservative, a hyaluronidase inhibitor or an albumin protein. For example, the pharmaceutical composition is formulated in the absence of salt or is formulated with a concentration of salt that is less than 130 mM.

[0190] In any of the examples of a pharmaceutical composition provided herein, the pharmaceutical composition is formulated for single dose administration or multiple dose administration. The pharmaceutical composition can be formulated for direct administration. Included among any of the pharmaceutical compositions provided herein are liquid compositions.

[0191] In examples of any of the pharmaceutical compositions provided herein, the concentration of modified PH20 is from or from about 0.1 μg/mL to 100 μg/mL, 1 μg/mL to 50 μg/mL or 1 μg/mL to 20 μg/mL. For example, the amount of a modified PH20 in any of the pharmaceutical compositions provided herein is between or about between 10 U/mL to 5000 U/mL, 50 U/mL to 4000 U/mL, 100 U/mL to 2000 U/mL, 300 U/mL to 2000 U/mL, 600 U/mL to 2000 U/mL, or 100 U/mL to 1000 U/mL. The volume of any of the pharmaceutical compositions provided herein is from or from about 0.5 mL to 50 mL, 1 mL to 10 mL, or 1 mL to 5 mL, for example at least 0.5 mL, 1 mL, 2 mL, 3 mL, 4 mL, 5 mL, 6 mL, 7 mL, 8 mL, 9 mL, 10 mL, 15 mL, 20 mL, 25 mL, 30 mL, 35 mL, 40 mL, 45 mL, 50 mL or more.

[0192] Included among any of the pharmaceutical compositions provided herein are any that contain any of the modified PH20 polypeptides provided herein and a therapeutically active agent. Also provided herein are combinations containing a first composition that is any of the above compositions provided herein or is any composition that contains a modified PH20 polypeptide provided herein, and a second composition that contains a therapeutic agent or therapeutically active agent. In any of the above compositions or combinations, the therapeutic agent is a polypeptide, a protein, a nucleic acid, a drug, a small molecule or an organic molecule. For example, the therapeutically active agent is a chemotherapeutic agent, an analgesic agent, an anti-inflammatory agent, an antimicrobial agent, an amoebicidal agent, a trichomonocidal agent, an anti-Parkinson agent, an anti-malarial agent, an anticonvulsant agent, an anti-depressant agent, and antiarthritics agent, an anti-fungal agent, an antihypertensive agent, an antipyretic agent, an anti-parasite agent, an antihistamine agent, an alpha-adrenargic agonist agent, an alpha blocker agent, an anesthetic agent, a bronchial dilator agent, a biocide agent, a bactericide agent, a bacteriostat agent, a beta adrenergic blocker agent, a calcium channel blocker agent, a cardiovascular drug agent, a contraceptive agent, a decongestant agent, a diuretic agent, a depressant agent, a diagnostic agent, an electrolyte agent, a hypnotic agent, a hormone agent, a hyperglycemic agent, a muscle relaxant agent, a muscle contractant agent, an ophthalmic agent, a parasympathomimetic agent, a psychic energizer agent, a sedative agent, a sympathomimetic agent, a tranquilizer agent, a urinary agent, a vaginal agent, a viricide agent, a vitamin agent, a non-steroidal anti-inflammatory agent, an angiotensin converting enzyme inhibitor agent, or a sleep inducer.

[0193] For example, included in any of the above compositions or combinations, the therapeutic agent is an antibody, an Immune Globulin, a bisphosphonate, a cytokine, a chemotherapeutic agent, a coagulation factor or an insulin, such as a fast-acting insulin. Also included in any of the above compositions or combinations, the therapeutic agent is Adalimumabs, Agalsidase Betas, Alefacepts, Ampicillins, Anakinras, Antipoliomyelitic Vaccines, Anti-Thymocytes, Azithromycins, Becaplermins, Caspofungins, Cefazolins, Cefepimes, Cefotetans, Ceftazidimes, Ceftriaxones, Cetuximabs, Cilastatins, Clavulanic Acids, Clindamycins, Darbepoetin Alfas, Daclizumabs, Diphtheria, Diphtheria antitoxins, Diphtheria Toxoids, Efalizumabs, Epinephrines, Erythropoietin Alphas, Etanercepts, Filgrastims, Fluconazoles, Follicle-Stimulating Hormones, Follitropin Alphas, Follitropin Betas, Fosphenytoins, Gadodiamides, Gadopentetates, Gatifloxacins, Glatiramers, Granulocyte macrophage colony-stimulating factors (GM-CSFs), Goserelin acetates, Granisetrons, Haemophilus Influenza Bs, Haloperidols, Hepatitis vaccines, Hepatitis A Vaccines, Hepatitis B Vaccines, Ibritumomab Tiuxetans, Ibritumomabs, Tiuxetans, Immunoglobulins, Hemophilus influenza vaccines, Influenza Virus Vaccines, Infliximabs, Insulin lispro, 75% neutral protamine lispro (NPL)/25% insulin lispro, 50% neutral protamine Hagedorn (NPH)/50% regular insulin, 70% NPH/30% regular insulin, Regular insulin, NPH insulin, Ultra insulin, Ultralente insulin, Insulin Glargines, Interferons, Interferon alphas, Interferon betas, Interferon gammas, Interferon alpha-2a, Interferon alpha-2b, Interferon Alphacon, Interferon alpha-n, Interferon Betas, Interferon Beta-1as, Interferon Gammas, Interferon alpha-con, Iodixanols, Iohexols, Iopamidols, Ioversols, Ketorolacs, Laronidases, Levofloxacins, Lidocaines, Linezolids, Lorazepams, Measles Vaccines, Measles virus, Mumps viruses, Measles-Mumps-Rubella Virus Vaccines, Rubella vaccines, Medroxyprogesterones, Meropenems, Methylprednisolones, Midazolams, Morphines, Octreotides, Omalizumabs, Ondansetrons, Palivizumabs, Pantoprazoles, Pegaspargases, Pegfilgrastims, Peg-Interferon Alpha-2as, Peg-Interferon Alpha-2bs, Pegvisomants, Pertussis vaccines, Piperacillins, Pneumococcal Vaccines Pneumococcal Conjugate Vaccines, Promethazines, Reteplases, Somatropins, Sulbactams, Sumatriptans, Tazobactams, Tenecteplases, Tetanus Purified Toxoids, Ticarcillins, Tositumomabs, Triamcinolones, Triamcinolone Acetonides, Triamcinolone hexacetonides, Vancomycins, Varicella Zoster immunoglobulins, Varicella vaccines, other vaccines, Alemtuzumabs, Alitretinoins, Allopurinols, Altretamines, Amifostines, Anastrozoles, Arsenics, Arsenic Trioxides, Asparaginases, Bacillus Calmette-Guerin (BCG) vaccines, BCG Live, Bexarotenes, Bleomycins, Busulfans, Busulfan intravenous, Busulfan orals, Calusterones, Capecitabines, Carboplatins, Carmustines, Carmustines with Polifeprosans, Celecoxibs, Chlorambucils, Cisplatins, Cladribines, Cyclophosphamides, Cytarabines, Cytarabine liposomals, Dacarbazines, Dactinomycins, Daunorubicin liposomals, Daunorubicins, Denileukin Diftitoxes, Dexrazoxanes, Docetaxels, Doxorubicins, Doxorubicin liposomals, Dromostanolone propionates, Elliotts B Solutions, Epirubicins, Epoetin alfas, Estramustines, Etoposide phosphates, Exemestanes, Floxuridines, Fludarabines, Fluorouracils, Fulvestrants, Gemcitabines, Gemtuzumabs, Ozogamicins, Gemtuzumab ozogamicins, Hydroxyureas, Idarubicins, Ifosfamides, Imatinib mesylates, Irinotecans, Letrozoles, Leucovorins, Levamisoles, Lomustines, Mechlorethamines, Nitrogen mustards, Megestrols, Megestrol acetates, Melphalans, Mercaptopurines, Mesnas, Methotrexates, Methoxsalens, Mitomycins, Mitomycin Cs, Mitotanes, Mitoxantrones, Nandrolones, Nandrolone Phenpropionates, Nofetumomabs, Oprelvekins, Oxaliplatins, Paclitaxels, Pamidronates, Pegademases, Pentostatins, Pipobromans, Plicamycins, Porfimer sodiums, Procarbazines, Quinacrines, Rasburicases, Rituximabs, Sargramostims, Streptozocins, Talcs, Tamoxifens, Temozolomides, Teniposides, Testolactones, Thioguanines, Triethylenethiophosphoramides (Thiotepas), Topotecans, Toremifenes, Trastuzumabs, Tretinoins, Uracil Mustards, Valrubicins, Vinblastines, Vincristines, Vinorelbines, Zoledronates, Acivicins, Aclarubicins, Acodazoles, Acronines, Adozelesins, Retinoic Acids, 9-Cis-Retinoic Acids, Alvocidibs, Ambazones, Ambomycins, Ametantrones, Aminoglutethimides, Amsacrines, Anaxirones, Ancitabines, Anthramycins, Apaziquones, Argimesnas, Asperlins, Atrimustines, Azacitidines, Azetepas, Azotomycins, Banoxantrones, Batabulins, Batimastats, Benaxibines, Bendamustines, Benzodepas, Bicalutamides, Bietaserpines, Biricodars, Bisantrenes, Bisnafide Dimesylates, Bizelesins, Bortezomibs, Brequinars, Bropirimines, Budotitanes, Cactinomycins, Canertinibs, Caracemides, Carbetimers, Carboquones, Carmofurs, Carubicins, Carzelesins, Cedefingols, Cemadotins, Cioteronels, Cirolemycins, Clanfenurs, Clofarabines, Crisnatols, Decitabines, Dexniguldipines, Dexormaplatins, Dezaguanines, Diaziquones, Dibrospidiums, Dienogests, Dinalins, Disermolides, Dofequidars, Doxifluridines, Droloxifenes, Duazomycins, Ecomustines, Edatrexates, Edotecarins, Eflomithines, Elacridars, Elinafides, Elsamitrucins, Emitefurs, Enloplatins, Enpromates, Enzastaurins, Epipropidines, Eptaloprosts, Erbulozoles, Esorubicins, Etanidazoles, Etoglucids, Etoprines, Exisulinds, Fadrozoles, Fazarabines, Fenretinides, Fluoxymesterones, Flurocitabines, Fosquidones, Fostriecins, Fotretamines, Galarubicins, Galocitabines, Geroquinols, Gimatecans, Gimeracils, Gloxazones, Glufosfamides, Ilmofosines, Ilomastats, Imexons, Improsulfans, Indisulams, Inproquones, Interleukins, Interleukin-2s, recombinant Interleukins, Intoplicines, Iobenguanes, Iproplatins, Irsogladines, Ixabepilones, Ketotrexates, L-Alanosines, Lanreotides, Lapatinibs, Ledoxantrones, Leuprolides, Lexacalcitols, Liarozoles, Lobaplatins, Lometrexols, Lonafarnibs, Losoxantrones, Lurtotecans, Mafosfamides, Mannosulfans, Marimastats, Masoprocols, Maytansines, Melengestrols, Menogarils, Mepitiostanes, Metesinds, Metomidates, Metoprines, Meturedepas, Miboplatins, Miproxifenes, Misonidazoles, Mitindomides, Mitocarcins, Mitocromins, Mitoflaxones, Mitogillins, Mitoguazones, Mitomalcins, Mitonafides, Mitoquidones, Mitospers, Mitozolomides, Mivobulins, Mizoribines, Mofarotenes, Mopidamols, Mubritinibs, Mycophenolic Acids, Nedaplatins, Nelarabines, Nemorubicins, Nitracrines, Nocodazoles, Nogalamycins, Nolatrexeds, Nortopixantrones, Ormaplatins, Ortataxels, Oteracils, Oxisurans, Oxophenarsines, Patupilones, Peldesines, Peliomycins, Pelitrexols, Pemetrexeds, Pentamustines, Peplomycins, Perfosfamides, Perifosines, Picoplatins, Pinafides, Piposulfans, Pirfenidones, Piroxantrones, Pixantrones, Plevitrexeds, Plomestanes, Porfiromycins, Prednimustines, Propamidines, Prospidiums, Pumitepas, Puromycins, Pyrazofurins, Ranimustines, Riboprines, Ritrosulfans, Rogletimides, Roquinimexs, Sabarubicins, Safingols, Satraplatins, Sebriplatins, Semustines, Simtrazenes, Sizofirans, Sobuzoxanes, Sorafenibs, Sparfosates, Sparfosic Acids, Sparsomycins, Spirogermaniums, Spiromustines, Spiroplatins, Squalamines, Streptonigrins, Streptovarycins, Sufosfamides, Sulofenurs, Tacedinalines, Talisomycins, Tallimustines, Tariquidars, Tauromustines, Tecogalans, Tegafurs, Teloxantrones, Temoporfins, Teroxirones, Thiamiprines, Tiamiprines, Tiazofurins, Tilomisoles, Tilorones, Timcodars, Timonacics, Tirapazamines, Topixantrones, Trabectedins, Trestolones, Triciribines, Trilostanes, Trimetrexates, Triplatin Tetranitrates, Triptorelins, Trofosfamides, Tubulozoles, Ubenimexs, Uredepas, Valspodars, Vapreotides, Verteporfins, Vindesines, Vinepidines, Vinflunines, Vinformides, Vinglycinates, Vinleucinols, Vinleurosines, Vinrosidines, Vintriptols, Vinzolidines, Vorozoles, Xanthomycin As, Guamecyclines, Zeniplatins, Zilascorbs [2-H], Zinostatins, Zorubicins, Zosuquidars, Acetazolamides, Acyclovirs, Adipiodones, Alatrofloxacins, Alfentanils, Allergenic extracts, Alpha 1-proteinase inhibitors, Alprostadils, Amikacins, Amino acids, Aminocaproic acids, Aminophyllines, Amitriptylines, Amobarbitals, Amrinones, Analgesics, Anti-poliomyelitis vaccines, Anti-rabic serums, Anti-tetanus immunoglobulins, tetanus vaccines, Antithrombin IIIs, Antivenom serums, Argatrobans, Arginines, Ascorbic acids, Atenolols, Atracuriums, Atropines, Aurothioglucoses, Azathioprines, Aztreonams, Bacitracins, Baclofens, Basiliximabs, Benzoic acids, Benztropines, Betamethasones, Biotins, Bivalirudins, Botulism antitoxins, Bretyliums, Bumetanides, Bupivacaines, Buprenorphines, Butorphanols, Calcitonins, Calcitriols, Calciums, Capreomycins, Carboprosts, Carnitines, Cefamandoles, Cefoperazones, Cefotaximes, Cefoxitins, Ceftizoximes, Cefuroximes, Chloramphenicols, Chloroprocaines, Chloroquines, Chlorothiazides, Chlorpromazines, Chondroitinsulfuric acids, Choriogonadotropin alfas, Chromiums, Cidofovirs, Cimetidines, Ciprofloxacins, Cisatracuriums, Clonidines, Codeines, Colchicines, Colistins, Collagens, Corticorelin ovine triflutates, Corticotrophins, Cosyntropins, Cyanocobalamins, Cyclosporines, Cysteines, Dacliximabs, Dalfopristins, Dalteparins, Danaparoids, Dantrolenes, Deferoxamines, Desmopressins, Dexamethasones, Dexmedetomidines, Dexpanthenols, Dextrans, Iron dextrans, Diatrizoic acids, Diazepams, Diazoxides, Dicyclomines, Digibinds, Digoxins, Dihydroergotamines, Diltiazems, Diphenhydramines, Dipyridamoles, Dobutamines, Dopamines, Doxacuriums, Doxaprams, Doxercalciferols, Doxycyclines, Droperidols, Dyphyllines, Edetic acids, Edrophoniums, Enalaprilats, Ephedrines, Epoprostenols, Ergocalciferols, Ergonovines, Ertapenems, Erythromycins, Esmolols, Estradiols, Estrogenics, Ethacrynic acids, Ethanolamines, Ethanols, Ethiodized oils, Etidronic acids, Etomidates, Famotidines, Fenoldopams, Fentanyls, Flumazenils, Fluoresceins, Fluphenazines, Folic acids, Fomepizoles, Fomivirsens, Fondaparinuxs, Foscarnets, Fosphenytoins, Furosemides, Gadoteridols, Gadoversetamides, Ganciclovirs, Gentamicins, Glucagons, Glucoses, Glycines, Glycopyrrolates, Gonadorelins, Gonadotropin chorionics, Haemophilus B polysaccharides, Hemins, Herbals, Histamines, Hydralazines, Hydrocortisones, Hydromorphones, Hydroxocobalamins, Hydroxyzines, Hyoscyamines, Ibutilides, Imiglucerases, Indigo carmines, Indomethacins, Iodides, Iopromides, Iothalamic acids, Ioxaglic acids, Ioxilans, Isoniazids, Isoproterenols, Japanese encephalitis vaccines, Kanamycins, Ketamines, Labetalols, Lepirudins, Levobupivacaines, Levothyroxines, Lincomycins, Liothyronines, Luteinizing hormones, Lyme disease vaccines, Mangafodipirs, Manthtols, Meningococcal polysaccharide vaccines, Meperidines, Mepivacaines, Mesoridazines, Metaraminols, Methadones, Methocarbamols, Methohexitals, Methyldopates, Methylergonovines, Metoclopramides, Metoprolols, Metronidazoles, Minocyclines, Mivacuriums, Morrhuic acids, Moxifloxacins, Muromonab-CD3s, Mycophenolate mofetils, Nafcillins, Nalbuphines, Nalmefenes, Naloxones, Neostigmines, Niacinamides, Nicardipines, Nitroglycerins, Nitroprussides, Norepinephrines, Orphenadrines, Oxacillins, Oxymorphones, Oxytetracyclines, Oxytocins, Pancuroniums, Panthenols, Pantothenic acids, Papaverines, Peginterferon alpha 2As, Penicillin Gs, Pentamidines, Pentazocines, Pentobarbitals, Perflutrens, Perphenazines, Phenobarbitals, Phentolamines, Phenylephrines, Phenytoins, Physostigmines, Phytonadiones, Polymyxin, Pralidoximes, Prilocaines, Procainamides, Procaines, Prochlorperazines, Progesterones, Propranolols, Pyridostigmine hydroxides, Pyridoxines, Quinidines, Quinupristins, Rabies immunoglobulins, Rabies vaccines, Ranitidines, Remifentanils, Riboflavins, Rifampins, Ropivacaines, Samariums, Scopolamines, Seleniums, Sermorelins, Sincalides, Somatrems, Spectinomycins, Streptokinases, Streptomycins, Succinylcholines, Sufentanils, Sulfamethoxazoles, Tacrolimuses, Terbutalines, Teriparatides, Testosterones, Tetanus antitoxins, Tetracaines, Tetradecyl sulfates, Theophyllines, Thiamines, Thiethylperazines, Thiopentals, Thyroid stimulating hormones, Tinzaparins, Tirofibans, Tobramycins, Tolazolines, Tolbutamides, Torsemides, Tranexamic acids, Treprostinils, Trifluoperazines, Trimethobenzamides, Trimethoprims, Tromethamines, Tuberculins, Typhoid vaccines, Urofollitropins, Urokinases, Valproic acids, Vasopressins, Vecuroniums, Verapamils, Voriconazoles, Warfarins, Yellow fever vaccines, Zidovudines, Zincs, Ziprasidone hydrochlorides, Aclacinomycins, Actinomycins, Adriamycins, Azaserines, 6-Azauridines, Carzinophilins, Chromomycins, Denopterins, 6 Diazo 5 Oxo-L-Norleucines, Enocitabines, Floxuridines, Olivomycins, Pirarubicins, Piritrexims, Pteropterins, Tegafurs, Tubercidins, Alteplases, Arcitumomabs, bevacizumabs, Botulinum Toxin Type As, Botulinum Toxin Type Bs, Capromab Pendetides, Daclizumabs, Dornase alphas, Drotrecogin alphas, Imciromab Pentetates, Iodine-131s, an antibiotic agent, an angiogenesis inhibitor, anti-cataract and anti-diabetic retinopathy substances, carbonic anhydrase inhibitors, mydriatics, photodynamic therapy agents, prostaglandin analogs, growth factor, anti-neoplastics, anti-metabolites, anti-viral, amebicides, anti-protozoals, anti-tuberculosis agents, anti-leprotics, antitoxins and antivenins, antihemophilic factor, anti-inhibitor coagulant complex, antithrombin III, coagulations Factor V, coagulation Factor IX, plasma protein fraction, von Willebrand factor, an antiplatelet agent, a colony stimulating factor (CSF), an erythropoiesis stimulator, hemostatics, albumins, Immune Globulins, thrombin inhibitors, anticoagulants, a steroidal anti-inflammatory drug selected from among alclometasones, algestones, beclomethasones, betamethasones, budesonides, clobetasols, clobetasones, clocortolones, cloprednols, corticosterones, cortisones, cortivazols, deflazacorts, desonides, desoximetasones, dexamethasones, diflorasones, diflucortolones, difluprednates, enoxolones, fluazacorts, flucloronides, flumethasones, flunisolides, fluocinolones, fluocinonides, fluocortins, fluocortolones, fluorometholones, fluperolones, fluprednidenes, fluprednisolones, flurandrenolides, fluticasones, formocortals, halcinonides, halobetasols, halometasones, halopredones, hydrocortamates, hydrocortisones, loteprednol etabonate, mazipredones, medrysones, meprednisones, methylprednisolones, mometasone furoate, paramethasones, prednicarbates, prednisolones, prednisones, prednivals, prednylidenes, rimexolones, tixocortols and triamcinolones, Docosenoid, prostaglandins, prostaglandin analogs, antiprostaglandins, prostaglandin precursors, miotics, cholinergics, anti-cholinesterase, or anti-allergenics.

[0194] Provided herein is a system for the non-refrigerated storage of a stable PH20 hyaluronidase formulation that contains any of the modified PH20 polypeptides provided herein or any of the pharmaceutical compositions provided herein and a container suitable for storage without refrigeration. Typically the modified PH20 polypeptide or the pharmaceutical composition containing the modified PH20 polypeptide is provided as a liquid. The container can be a vial, syringe, tube or bag or other container. The container can be glass or plastic.

[0195] Provided herein is a method of preparing a pharmaceutical composition containing a PH20 hyaluronidase that can be stored for direct administration without refrigeration that includes providing any of the modified PH20 polypeptides provided herein, and formulating the polypeptide as a liquid with a pharmaceutically acceptable buffering agent for parenteral administration, such as for intravenous or subcutaneous administration. In examples of the method, the amount of buffering agent is an amount sufficient to maintain a pH range of between or about between 6.0 to 7.8, inclusive, for example, a pH range of between or about between 6.5 to 7.5, inclusive. The buffering agent can be Tris, histidine, phosphate or citrate, such as sodium phosphate. In examples of the above method, the amount of buffering agent is between 1 mM to 100 mM. In any of the above examples of the method, the PH20 polypeptide is formulated in the absence of a stabilizer that is an amino acid, an amino acid derivative, an amine, a sugar, a polyol, a surfactant, a preservative, a hyaluronidase inhibitor or an albumin protein. In other examples of the above method, the PH20 polypeptide is formulated in the absence of salt or is formulated with a concentration of salt that is less than 130 mM. Also provided herein is a pharmaceutical composition that is prepared by any of the above methods.

[0196] Provided herein is a method for treating a hyaluronan-associated disease or condition, by administering to a subject any of the pharmaceutical compositions provided herein. The hyaluronan-associated disease or condition is an inflammatory disease or a tumor or cancer. For example, the hyaluronan-associated disease or condition is an edema, cardiovascular disease, tumor or cancer or other disease or condition as described herein caused by or associated with accumulated or excess hyaluronan. For example, the hyaluronan-associated disease or condition is a tumor or cancer, such as one where the tumor is a solid tumor. The hyaluronan-associated disease or condition can be late-stage cancers, metastatic cancers or an undifferentiated cancers. In particular examples, the hyaluronan-associated disease or condition is an ovarian cancer, in situ carcinoma (ISC), squamous cell carcinoma (SCC), prostate cancer, pancreatic cancer, non-small cell lung cancer, breast cancer or colon cancer.

[0197] Also provided herein is a method for increasing delivery of a therapeutic agent to a subject, by administering a subject any of the pharmaceutical compositions and a therapeutic agent. In some examples of the method herein, any of the combinations provided herein containing a therapeutic agent is administered to the subject. In examples of such methods, the administration is subcutaneous. The composition containing a modified PH20 polypeptide can be administered prior to, simultaneously, intermittently or subsequent to administration of the therapeutic agent.

[0198] In any of the examples of the above method for increasing delivery of a therapeutic agent, the therapeutic agent is a polypeptide, a protein, a nucleic acid, a drug, a small molecule or an organic molecule. For example, the therapeutic agent is a chemotherapeutic agent, an analgesic agent, an anti-inflammatory agent, an antimicrobial agent, an amoebicidal agent, a trichomonocidal agent, an anti-Parkinson agent, an anti-malarial agent, an anticonvulsant agent, an anti-depressant agent, and antiarthritics agent, an anti-fungal agent, an antihypertensive agent, an antipyretic agent, an anti-parasite agent, an antihistamine agent, an alpha-adrenargic agonist agent, an alpha blocker agent, an anesthetic agent, a bronchial dilator agent, a biocide agent, a bactericide agent, a bacteriostat agent, a beta adrenergic blocker agent, a calcium channel blocker agent, a cardiovascular drug agent, a contraceptive agent, a decongestant agent, a diuretic agent, a depressant agent, a diagnostic agent, an electrolyte agent, a hypnotic agent, a hormone agent, a hyperglycemic agent, a muscle relaxant agent, a muscle contractant agent, an ophthalmic agent, a parasympathomimetic agent, a psychic energizer agent, a sedative agent, a sympathomimetic agent, a tranquilizer agent, a urinary agent, a vaginal agent, a viricide agent, a vitamin agent, a non-steroidal anti-inflammatory agent, an angiotensin converting enzyme inhibitor agent, or a sleep inducer. In particular examples, the therapeutic agent is selected from among an antibody, an Immune Globulin, a bisphosphonate, a cytokine, a chemotherapeutic agent, a coagulation factor and an insulin, such as a fast-acting insulin. In other examples, the therapeutic agent is selected from among Adalimumabs, Agalsidase Betas, Alefacepts, Ampicillins, Anakinras, Antipoliomyelitic Vaccines, Anti-Thymocytes, Azithromycins, Becaplermins, Caspofungins, Cefazolins, Cefepimes, Cefotetans, Ceftazidimes, Ceftriaxones, Cetuximabs, Cilastatins, Clavulanic Acids, Clindamycins, Darbepoetin Alfas, Daclizumabs, Diphtheria, Diphtheria antitoxins, Diphtheria Toxoids, Efalizumabs, Epinephrines, Erythropoietin Alphas, Etanercepts, Filgrastims, Fluconazoles, Follicle-Stimulating Hormones, Follitropin Alphas, Follitropin Betas, Fosphenytoins, Gadodiamides, Gadopentetates, Gatifloxacins, Glatiramers, Granulocyte macrophage colony-stimulating factors (GM-CSFs), Goserelin acetates, Granisetrons, Haemophilus Influenza Bs, Haloperidols, Hepatitis vaccines, Hepatitis A Vaccines, Hepatitis B Vaccines, Ibritumomab Tiuxetans, Ibritumomabs, Tiuxetans, Immunoglobulins, Hemophilus influenza vaccines, Influenza Virus Vaccines, Infliximabs, Insulin lispro, 75% neutral protamine lispro (NPL)/25% insulin lispro, 50% neutral protamine Hagedorn (NPH)/50% regular insulin, 70% NPH/30% regular insulin, Regular insulin, NPH insulin, Ultra insulin, Ultralente insulin, Insulin Glargines, Interferons, Interferon alphas, Interferon betas, Interferon gammas, Interferon alpha-2a, Interferon alpha-2b, Interferon Alphacon, Interferon alpha-n, Interferon Betas, Interferon Beta-1as, Interferon Gammas, Interferon alpha-con, Iodixanols, Iohexols, Iopamidols, Ioversols, Ketorolacs, Laronidases, Levofloxacins, Lidocaines, Linezolids, Lorazepams, Measles Vaccines, Measles virus, Mumps viruses, Measles-Mumps-Rubella Virus Vaccines, Rubella vaccines, Medroxyprogesterones, Meropenems, Methylprednisolones, Midazolams, Morphines, Octreotides, Omalizumabs, Ondansetrons, Palivizumabs, Pantoprazoles, Pegaspargases, Pegfilgrastims, Peg-Interferon Alpha-2as, Peg-Interferon Alpha-2bs, Pegvisomants, Pertussis vaccines, Piperacillins, Pneumococcal Vaccines Pneumococcal Conjugate Vaccines, Promethazines, Reteplases, Somatropins, Sulbactams, Sumatriptans, Tazobactams, Tenecteplases, Tetanus Purified Toxoids, Ticarcillins, Tositumomabs, Triamcinolones, Triamcinolone Acetonides, Triamcinolone hexacetonides, Vancomycins, Varicella Zoster immunoglobulins, Varicella vaccines, other vaccines, Alemtuzumabs, Alitretinoins, Allopurinols, Altretamines, Amifostines, Anastrozoles, Arsenics, Arsenic Trioxides, Asparaginases, Bacillus Calmette-Guerin (BCG) vaccines, BCG Live, Bexarotenes, Bleomycins, Busulfans, Busulfan intravenous, Busulfan orals, Calusterones, Capecitabines, Carboplatins, Carmustines, Carmustines with Polifeprosans, Celecoxibs, Chlorambucils, Cisplatins, Cladribines, Cyclophosphamides, Cytarabines, Cytarabine liposomals, Dacarbazines, Dactinomycins, Daunorubicin liposomals, Daunorubicins, Denileukin Diftitoxes, Dexrazoxanes, Docetaxels, Doxorubicins, Doxorubicin liposomals, Dromostanolone propionates, Elliotts B Solutions, Epirubicins, Epoetin alfas, Estramustines, Etoposide phosphates, Exemestanes, Floxuridines, Fludarabines, Fluorouracils, Fulvestrants, Gemcitabines, Gemtuzumabs, Ozogamicins, Gemtuzumab ozogamicins, Hydroxyureas, Idarubicins, Ifosfamides, Imatinib mesylates, Irinotecans, Letrozoles, Leucovorins, Levamisoles, Lomustines, Mechlorethamines, Nitrogen mustards, Megestrols, Megestrol acetates, Melphalans, Mercaptopurines, Mesnas, Methotrexates, Methoxsalens, Mitomycins, Mitomycin Cs, Mitotanes, Mitoxantrones, Nandrolones, Nandrolone Phenpropionates, Nofetumomabs, Oprelvekins, Oxaliplatins, Paclitaxels, Pamidronates, Pegademases, Pentostatins, Pipobromans, Plicamycins, Porfimer sodiums, Procarbazines, Quinacrines, Rasburicases, Rituximabs, Sargramostims, Streptozocins, Talcs, Tamoxifens, Temozolomides, Teniposides, Testolactones, Thioguanines, Triethylenethiophosphoramides (Thiotepas), Topotecans, Toremifenes, Trastuzumabs, Tretinoins, Uracil Mustards, Valrubicins, Vinblastines, Vincristines, Vinorelbines, Zoledronates, Acivicins, Aclarubicins, Acodazoles, Acronines, Adozelesins, Retinoic Acids, 9-Cis-Retinoic Acids, Alvocidibs, Ambazones, Ambomycins, Ametantrones, Aminoglutethimides, Amsacrines, Anaxirones, Ancitabines, Anthramycins, Apaziquones, Argimesnas, Asperlins, Atrimustines, Azacitidines, Azetepas, Azotomycins, Banoxantrones, Batabulins, Batimastats, Benaxibines, Bendamustines, Benzodepas, Bicalutamides, Bietaserpines, Biricodars, Bisantrenes, Bisnafide Dimesylates, Bizelesins, Bortezomibs, Brequinars, Bropirimines, Budotitanes, Cactinomycins, Canertinibs, Caracemides, Carbetimers, Carboquones, Carmofurs, Carubicins, Carzelesins, Cedefingols, Cemadotins, Cioteronels, Cirolemycins, Clanfenurs, Clofarabines, Crisnatols, Decitabines, Dexniguldipines, Dexormaplatins, Dezaguanines, Diaziquones, Dibrospidiums, Dienogests, Dinalins, Disermolides, Dofequidars, Doxifluridines, Droloxifenes, Duazomycins, Ecomustines, Edatrexates, Edotecarins, Eflomithines, Elacridars, Elinafides, Elsamitrucins, Emitefurs, Enloplatins, Enpromates, Enzastaurins, Epipropidines, Eptaloprosts, Erbulozoles, Esorubicins, Etanidazoles, Etoglucids, Etoprines, Exisulinds, Fadrozoles, Fazarabines, Fenretinides, Fluoxymesterones, Flurocitabines, Fosquidones, Fostriecins, Fotretamines, Galarubicins, Galocitabines, Geroquinols, Gimatecans, Gimeracils, Gloxazones, Glufosfamides, Ilmofosines, Ilomastats, Imexons, Improsulfans, Indisulams, Inproquones, Interleukins, Interleukin-2s, recombinant Interleukins, Intoplicines, Iobenguanes, Iproplatins, Irsogladines, Ixabepilones, Ketotrexates, L-Alanosines, Lanreotides, Lapatinibs, Ledoxantrones, Leuprolides, Lexacalcitols, Liarozoles, Lobaplatins, Lometrexols, Lonafarnibs, Losoxantrones, Lurtotecans, Mafosfamides, Mannosulfans, Marimastats, Masoprocols, Maytansines, Melengestrols, Menogarils, Mepitiostanes, Metesinds, Metomidates, Metoprines, Meturedepas, Miboplatins, Miproxifenes, Misonidazoles, Mitindomides, Mitocarcins, Mitocromins, Mitoflaxones, Mitogillins, Mitoguazones, Mitomalcins, Mitonafides, Mitoquidones, Mitospers, Mitozolomides, Mivobulins, Mizoribines, Mofarotenes, Mopidamols, Mubritinibs, Mycophenolic Acids, Nedaplatins, Nelarabines, Nemorubicins, Nitracrines, Nocodazoles, Nogalamycins, Nolatrexeds, Nortopixantrones, Ormaplatins, Ortataxels, Oteracils, Oxisurans, Oxophenarsines, Patupilones, Peldesines, Peliomycins, Pelitrexols, Pemetrexeds, Pentamustines, Peplomycins, Perfosfamides, Perifosines, Picoplatins, Pinafides, Piposulfans, Pirfenidones, Piroxantrones, Pixantrones, Plevitrexeds, Plomestanes, Porfiromycins, Prednimustines, Propamidines, Prospidiums, Pumitepas, Puromycins, Pyrazofurins, Ranimustines, Riboprines, Ritrosulfans, Rogletimides, Roquinimexs, Sabarubicins, Safingols, Satraplatins, Sebriplatins, Semustines, Simtrazenes, Sizofirans, Sobuzoxanes, Sorafenibs, Sparfosates, Sparfosic Acids, Sparsomycins, Spirogermaniums, Spiromustines, Spiroplatins, Squalamines, Streptonigrins, Streptovarycins, Sufosfamides, Sulofenurs, Tacedinalines, Talisomycins, Tallimustines, Tariquidars, Tauromustines, Tecogalans, Tegafurs, Teloxantrones, Temoporfins, Teroxirones, Thiamiprines, Tiamiprines, Tiazofurins, Tilomisoles, Tilorones, Timcodars, Timonacics, Tirapazamines, Topixantrones, Trabectedins, Trestolones, Triciribines, Trilostanes, Trimetrexates, Triplatin Tetranitrates, Triptorelins, Trofosfamides, Tubulozoles, Ubenimexs, Uredepas, Valspodars, Vapreotides, Verteporfins, Vindesines, Vinepidines, Vinflunines, Vinformides, Vinglycinates, Vinleucinols, Vinleurosines, Vinrosidines, Vintriptols, Vinzolidines, Vorozoles, Xanthomycin As, Guamecyclines, Zeniplatins, Zilascorbs [2-H], Zinostatins, Zorubicins, Zosuquidars, Acetazolamides, Acyclovirs, Adipiodones, Alatrofloxacins, Alfentanils, Allergenic extracts, Alpha 1-proteinase inhibitors, Alprostadils, Amikacins, Amino acids, Aminocaproic acids, Aminophyllines, Amitriptylines, Amobarbitals, Amrinones, Analgesics, Anti-poliomyelitis vaccines, Anti-rabic serums, Anti-tetanus immunoglobulins, tetanus vaccines, Antithrombin IIIs, Antivenom serums, Argatrobans, Arginines, Ascorbic acids, Atenolols, Atracuriums, Atropines, Aurothioglucoses, Azathioprines, Aztreonams, Bacitracins, Baclofens, Basiliximabs, Benzoic acids, Benztropines, Betamethasones, Biotins, Bivalirudins, Botulism antitoxins, Bretyliums, Bumetanides, Bupivacaines, Buprenorphines, Butorphanols, Calcitonins, Calcitriols, Calciums, Capreomycins, Carboprosts, Carnitines, Cefamandoles, Cefoperazones, Cefotaximes, Cefoxitins, Ceftizoximes, Cefuroximes, Chloramphenicols, Chloroprocaines, Chloroquines, Chlorothiazides, Chlorpromazines, Chondroitinsulfuric acids, Choriogonadotropin alfas, Chromiums, Cidofovirs, Cimetidines, Ciprofloxacins, Cisatracuriums, Clonidines, Codeines, Colchicines, Colistins, Collagens, Corticorelin ovine triflutates, Corticotrophins, Cosyntropins, Cyanocobalamins, Cyclosporines, Cysteines, Dacliximabs, Dalfopristins, Dalteparins, Danaparoids, Dantrolenes, Deferoxamines, Desmopressins, Dexamethasones, Dexmedetomidines, Dexpanthenols, Dextrans, Iron dextrans, Diatrizoic acids, Diazepams, Diazoxides, Dicyclomines, Digibinds, Digoxins, Dihydroergotamines, Diltiazems, Diphenhydramines, Dipyridamoles, Dobutamines, Dopamines, Doxacuriums, Doxaprams, Doxercalciferols, Doxycyclines, Droperidols, Dyphyllines, Edetic acids, Edrophoniums, Enalaprilats, Ephedrines, Epoprostenols, Ergocalciferols, Ergonovines, Ertapenems, Erythromycins, Esmolols, Estradiols, Estrogenics, Ethacrynic acids, Ethanolamines, Ethanols, Ethiodized oils, Etidronic acids, Etomidates, Famotidines, Fenoldopams, Fentanyls, Flumazenils, Fluoresceins, Fluphenazines, Folic acids, Fomepizoles, Fomivirsens, Fondaparinuxs, Foscarnets, Fosphenytoins, Furosemides, Gadoteridols, Gadoversetamides, Ganciclovirs, Gentamicins, Glucagons, Glucoses, Glycines, Glycopyrrolates, Gonadorelins, Gonadotropin chorionics, Haemophilus B polysaccharides, Hemins, Herbals, Histamines, Hydralazines, Hydrocortisones, Hydromorphones, Hydroxocobalamins, Hydroxyzines, Hyoscyamines, Ibutilides, Imiglucerases, Indigo carmines, Indomethacins, Iodides, Iopromides, Iothalamic acids, Ioxaglic acids, Ioxilans, Isoniazids, Isoproterenols, Japanese encephalitis vaccines, Kanamycins, Ketamines, Labetalols, Lepirudins, Levobupivacaines, Levothyroxines, Lincomycins, Liothyronines, Luteinizing hormones, Lyme disease vaccines, Mangafodipirs, Manthtols, Meningococcal polysaccharide vaccines, Meperidines, Mepivacaines, Mesoridazines, Metaraminols, Methadones, Methocarbamols, Methohexitals, Methyldopates, Methylergonovines, Metoclopramides, Metoprolols, Metronidazoles, Minocyclines, Mivacuriums, Morrhuic acids, Moxifloxacins, Muromonab-CD3s, Mycophenolate mofetils, Nafcillins, Nalbuphines, Nalmefenes, Naloxones, Neostigmines, Niacinamides, Nicardipines, Nitroglycerins, Nitroprussides, Norepinephrines, Orphenadrines, Oxacillins, Oxymorphones, Oxytetracyclines, Oxytocins, Pancuroniums, Panthenols, Pantothenic acids, Papaverines, Peginterferon alpha 2As, Penicillin Gs, Pentamidines, Pentazocines, Pentobarbitals, Perflutrens, Perphenazines, Phenobarbitals, Phentolamines, Phenylephrines, Phenytoins, Physostigmines, Phytonadiones, Polymyxin, Pralidoximes, Prilocaines, Procainamides, Procaines, Prochlorperazines, Progesterones, Propranolols, Pyridostigmine hydroxides, Pyridoxines, Quinidines, Quinupristins, Rabies immunoglobulins, Rabies vaccines, Ranitidines, Remifentanils, Riboflavins, Rifampins, Ropivacaines, Samariums, Scopolamines, Seleniums, Sermorelins, Sincalides, Somatrems, Spectinomycins, Streptokinases, Streptomycins, Succinylcholines, Sufentanils, Sulfamethoxazoles, Tacrolimuses, Terbutalines, Teriparatides, Testosterones, Tetanus antitoxins, Tetracaines, Tetradecyl sulfates, Theophyllines, Thiamines, Thiethylperazines, Thiopentals, Thyroid stimulating hormones, Tinzaparins, Tirofibans, Tobramycins, Tolazolines, Tolbutamides, Torsemides, Tranexamic acids, Treprostinils, Trifluoperazines, Trimethobenzamides, Trimethoprims, Tromethamines, Tuberculins, Typhoid vaccines, Urofollitropins, Urokinases, Valproic acids, Vasopressins, Vecuroniums, Verapamils, Voriconazoles, Warfarins, Yellow fever vaccines, Zidovudines, Zincs, Ziprasidone hydrochlorides, Aclacinomycins, Actinomycins, Adriamycins, Azaserines, 6-Azauridines, Carzinophilins, Chromomycins, Denopterins, 6 Diazo 5 Oxo-L-Norleucines, Enocitabines, Floxuridines, Olivomycins, Pirarubicins, Piritrexims, Pteropterins, Tegafurs, Tubercidins, Alteplases, Arcitumomabs, bevacizumabs, Botulinum Toxin Type As, Botulinum Toxin Type Bs, Capromab Pendetides, Daclizumabs, Dornase alphas, Drotrecogin alphas, Imciromab Pentetates, Iodine-131s, an antibiotic agent, an angiogenesis inhibitor, anti-cataract and anti-diabetic retinopathy substances, carbonic anhydrase inhibitors, mydriatics, photodynamic therapy agents, prostaglandin analogs, growth factor, anti-neoplastics, anti-metabolites, anti-viral, amebicides, anti-protozoals, anti-tuberculosis agents, anti-leprotics, antitoxins and antivenins, antihemophilic factor, anti-inhibitor coagulant complex, antithrombin III, coagulations Factor V, coagulation Factor IX, plasma protein fraction, von Willebrand factor, an antiplatelet agent, a colony stimulating factor (CSF), an erythropoiesis stimulator, hemostatics, albumins, Immune Globulins, thrombin inhibitors, anticoagulants, a steroidal anti-inflammatory drug selected from among alclometasones, algestones, beclomethasones, betamethasones, budesonides, clobetasols, clobetasones, clocortolones, cloprednols, corticosterones, cortisones, cortivazols, deflazacorts, desonides, desoximetasones, dexamethasones, diflorasones, diflucortolones, difluprednates, enoxolones, fluazacorts, flucloronides, flumethasones, flunisolides, fluocinolones, fluocinonides, fluocortins, fluocortolones, fluorometholones, fluperolones, fluprednidenes, fluprednisolones, flurandrenolides, fluticasones, formocortals, halcinonides, halobetasols, halometasones, halopredones, hydrocortamates, hydrocortisones, loteprednol etabonate, mazipredones, medrysones, meprednisones, methylprednisolones, mometasone furoate, paramethasones, prednicarbates, prednisolones, prednisones, prednivals, prednylidenes, rimexolones, tixocortols and triamcinolones, Docosenoid, prostaglandins, prostaglandin analogs, antiprostaglandins, prostaglandin precursors, miotics, cholinergics, anti-cholinesterase, or anti-allergenics.

[0199] In any of the above method of treating a subject, the composition that is administered is one that has been or is stored without refrigeration prior to administration to the subject. In any of the methods herein, the method can include storing the composition without refrigeration prior to administration to the subject. In such examples, storing the composition without refrigeration exposes the composition to an ambient temperature that is between 18° C. to 45° C., 25° C. to 42° C. or 30° C. to 37° C., for example, to an ambient temperature greater than 25° C. The storage of the composition without refrigeration can be for greater than 48 hours, 72 hours, 96 hours, one week, two weeks, three weeks, one month, two months, three months, four months, five months or six months.

[0200] Also provided herein are medical uses of any of the pharmaceutical compositions or combinations provided herein for treating a hyaluronan-disease or disorder or for increasing the delivery of a therapeutic agent for treating a disease or condition treatable by the therapeutic agent. For example, provided herein are any of the pharmaceutical compositions provided herein or combinations provided herein for use in treating a hyaluronan-associated disease or disorder, such as an edema, cardiovascular disease, tumor or cancer or other hyaluronan-associated disease or disorder described herein or known to a skilled artisan. Also provided herein are any of the pharmaceutical compositions provided herein or combinations provided herein for use in delivering a therapeutic agent to a subject. The therapeutic agent can be any therapeutic agent that is known to treat a disease or condition, such as any described herein above or elsewhere herein. In any of the above examples of medical uses, including pharmaceutical compositions or combinations for use, the composition containing a modified PH20 is a non-refrigerated composition. Hence, provided herein are medical uses of a non-refrigerated PH20 pharmaceutical composition for treating a hyaluronan-associated disease or condition. Also provided herein are medical uses of a non-refrigerated PH20 for use in increasing delivery of a therapeutic agent, for example, for treating a disease or condition that is treated or treatable by the therapeutic agent.

[0201] Provided herein is a method for identifying or selecting a modified hyaluronan-degrading enzyme that exhibits thermal stability that contains the steps of a) testing the activity of a modified hyaluronan-degrading enzyme or a member of a collection of modified hyaluronan-degrading enzymes after incubation at a temperature for a predetermined time that provides a thermal stress condition to the unmodified hyaluronan-degrading enzyme not containing a modification; b) testing the activity of the modified hyaluronan-degrading enzyme or a member of a collection of modified hyaluronan-degrading enzymes after incubation at 2° C. to 8° C., wherein in the activity is tested under the same conditions as a) except for the difference in temperature; and c) selecting or identifying a modified hyaluronan-degrading enzyme that exhibits activity in a) that is at least 50% of the activity in b). In aspects of the method, in step c) a modified hyaluronan-degrading enzyme is selected or identified if the activity in a) is at least 55%, 60%, 65%, 70%, 75%, 80%, 85%, 90%, 95% or more of the activity in b). In any of the examples of a method of identifying or selecting a modified hyaluronan-degrading enzyme, the activity is hyaluronidase activity.

[0202] In examples of the above method of identifying or selecting a modified hyaluronan-degrading enzyme, the method can further include the steps of d) comparing the activity of the selected or identified modified hyaluronan-degrading enzyme in b) to the activity of the unmodified hyaluronan-degrading enzyme tested under the same conditions; and e) identifying or selecting a modified hyaluronan-degrading enzyme that exhibits at least 40%, 50%, 60%, 70%, 80%, 90%, 100% or more of the activity compared to the unmodified hyaluronan-degrading enzyme.

[0203] In any of the examples of a method of a method of identifying or selecting a modified hyalurnan-degrading enzyme, the thermal stress condition is a temperature that is or is greater than the T₅₀ of the unmodified hyaluronan-degrading enzyme not containing a modification as determined in a thermal challenge assay at the predetermined time. For example, the activity in a) is tested at a temperature that is at least 1° C., 2° C., 3° C., 4° C., 5° C., 6° C., 7° C., 8° C., 9° C., 10° C., 11° C., 12° C., 13° C., 14° C., 15° C., 16° C., 17° C., 18° C., 19° C., 20° C. or more greater than the T₅₀ of the unmodified hyaluronan-degrading enzyme as determined in a thermal challenge assay at the predetermined time. In aspects of the method, prior to step a), the method can include a step of determining the T₅₀ of the unmodified hyaluronan-degrading enzyme as determined in a thermal challenge assay at the predetermined time.

[0204] In other examples of any of the methods of identifying or selecting a modified hyaluronan-degrading enzyme provided, herein, the thermal stress condition is a temperature that is or is greater than the melting temperature (Tm) of the unmodified hyaluronan-degrading enzyme not containing a modification. For example, the activity in a) is tested at a temperature that is at least 1° C., 2° C., 3° C., 4° C., 5° C., 6° C., 7° C., 8° C., 9° C., 10° C., 11° C., 12° C., 13° C., 14° C., 15° C., 16° C., 17° C., 18° C., 19° C., 20° C. or more greater than the melting temperature (Tm) of the hyaluronan-degrading enzyme. In aspects of the method, prior to step a), the method can include a step of determining the melting temperature (Tm) of the hyaluronan-degrading enzyme. For example, the melting temperature (Tm) can be determined by dynamic light scattering, circular dichroism (CD) spectroscopy, fluorescence emission spectroscopy or nuclear magnetic resonance (NMR) spectroscopy.

[0205] In any of the examples of a method of identifying or selecting a modified hyaluronan-degrading enzyme, the activity in a) is tested at a temperature that is greater than 44° C., for example, greater than 45° C., 46° C., 47° C., 48° C., 49° C., 50° C., 51° C., 52° C., 53° C., 54° C., 55° C., 56° C., 57° C., 58° C., 59° C., 60° C. or greater. In particular examples of the method herein, the activity in a) is tested at a temperature that is greater than or is or is about 52° C. In these and any other examples of the methods herein, the hyaluronan-degrading enzyme, such as a modified hyaluronan-degrading enzyme, is incubated in step a) and step b) for a predetermined time that is at least 5 minutes, 10 minutes, 20 minutes, 30 minutes, 1 hour, 2 hours, 3 hours, 4 hours, 5 hours, 6 hours or more. For example, in examples of the method herein, the thermal stress condition in a) is incubation at a temperature that is greater than or is 52° C. for 10 minutes. Therefore, the condition in b) is incubation at a temperature that is 2° C. to 8° C., such as or about 4° C., for 10 minutes.

[0206] In any of the examples of a method of identifying or selecting a modified hyaluronan-degrading enzyme, the modified hyaluronan-degrading enzyme contains an amino acid replacement, insertion or deletion of amino acids compared to an unmodified hyaluronan-degrading enzyme. In particular examples, the modified hyaluronan-degrading enzyme contains an amino acid replacement or amino acid replacements. For example, the modified hyaluronan-degrading enzyme contains a single amino acid replacement or two, three, four, five, six, seven, eight, nine or more amino acid replacements compared to an unmodified form of the hyaluronan-degrading enzyme.

[0207] In any of the examples of a method of identifying or selecting a modified hyaluronan-degrading enzyme, a member of a collection of modified hyaluronan-degrading enzyme are tested in a) and/or b); and a plurality of modified hyaluronan-degrading enzymes are separately tested in a) and/or b). In such examples, the plurality of modified hyaluronan-degrading enzymes are modified compared to the corresponding unmodified hyaluronan-degrading enzyme to generate a collection of modified hyaluronan-degrading enzymes, whereby each modified protein in the collection is tested in each of a) and/or b), wherein each modified hyaluronan-degrading enzyme in the collection contains a single amino acid replacement compared to the unmodified form of the hyaluronan-degrading enzyme. For example, in the collection, the amino acid at each modified position is replaced by up to 1-19 other amino acids other than the original amino acid at the position, whereby each modified hyaluronan-degrading enzyme contains a different amino acid replacement. In particular examples of the generated collection, every amino acid along the length of the hyaluronan-degrading enzyme, or a selected portion thereof, is replaced.

[0208] In any of the examples of the method of identifying or selecting a modified hyaluronan-degrading enzyme, the hyaluronan-degrading enzyme that is tested is modified, for example by amino acid replacement or replacements, compared to an unmodified hyaluronan-degrading enzyme. The unmodified hyaluronan-degrading enzyme can be a chondroitinase or a hyaluronidase. For example, the unmodified hyaluronan-degrading enzyme is a hyaluronidase that is a PH20 hyaluronidase or truncated form thereof lacking a C-terminal glycosylphosphatidylinositol (GPI) anchor attachment site or a portion of the GPI anchor attachment site, whereby the truncated form exhibits hyaluronidase activity. The PH20 can be a human, monkey, bovine, ovine, rat, fox, mouse or guinea pig PH20. For example, the unmodified hyaluronan-degrading enzyme has the sequence of amino acids set forth in any of SEQ ID NOS: 3, 7, 10, 12, 14, 24, 32-66, 69, 72, 388, 390, 392, or 400 or a sequence of amino acids that is at least 80% sequence identity to any of SEQ ID NOS: 3, 7, 10, 12, 14, 24, 32-66, 69, 72, 388, 390, 392, or 400, such as at least 85%, 86%, 87%, 88%, 89%, 90%, 91%, 92%, 93%, 94%, 95%, 96%, 97%, 98%, 99% sequence identity to any of SEQ ID NOS: 3, 7, 10, 12, 14, 24, 32-66, 69, 72, 388, 390, 392, or 400. In particular, the PH20 is a human PH20 or a C-terminal truncated form thereof that is soluble. For example, the unmodified hyaluronan-degrading enzyme is a PH20 hyaluronidase having the sequence of amino acids set forth in any of SEQ ID NOS: 3, 7, 32-66, 69 or 72, or a sequence of amino acids that exhibits at least 85% sequence identity to any of SEQ ID NOS: 3, 7, 32-66, 69 or 72, such as at least 86%, 87%, 88%, 89%, 90%, 91%, 92%, 93%, 94%, 95%, 96%, 97%, 98%, 99% or more sequence identity to any of SEQ ID NOS: 3, 7, 32-66, 69 or 72.

[0209] In any of the examples of a method herein of identifying or selecting a modified hyaluronan-degrading enzyme that exhibits thermal stability, the method is performed in vitro. The method also can be performed by repeating any of the above steps a plurality of times, wherein in each repetition, further modified hyaluronan-degrading enzymes of a selected modified hyaluronan-degrading enzyme are generated and tested, whereby the modified hyaluronan-degrading enzyme is evolved to exhibit increased stability under a denaturation condition.

[0210] Also provided herein is a modified hyaluronan-degrading enzyme identified or selected by any of the above methods of identifying or selecting a modified hyaluronan-degrading enzyme that exhibits thermal stability.

### BRIEF DESCRIPTION OF THE FIGURES

[0211] FIG. 1 depicts the amino acid sequence of full-length human PH20 (set forth in SEQ ID NO:7) and soluble C-terminal truncated variants thereof. The C-terminal amino acid residue of exemplary C-terminal truncated variants of full-length PH20 are indicated by bold font. The complete amino acid sequences of exemplary C-terminal truncated variants of full-length PH20 also are provided in SEQ ID NOS: 3 and 32-66. The C-terminal amino acid residue of an exemplary soluble PH20, whose complete sequence is set forth in SEQ ID NO:3, also is indicated by underline. Exemplary, non-limiting, positions for amino acid replacements are indicated by highlighting. Corresponding positions of these and other amino acid replacements described herein can be identified by alignment of a sequence of interest with any of SEQ ID NOS: 3, 7 or 32-66, and in particular with SEQ ID NO:3.

[0212] FIG. 2 (A-L) depicts exemplary alignments of human soluble PH20 set forth in SEQ ID NO:3 with other PH20 polypeptides. A “*” means that the aligned residues are identical, a “:” means that aligned residues are not identical, but are similar and contain conservative amino acids residues at the aligned position, and a “.” means that the aligned residues are similar and contain semi-conservative amino acid residues at the aligned position. Exemplary, non-limiting, corresponding positions for amino acid replacements are indicated by highlighting. For example, FIG. 2A depicts the alignment of a human soluble PH20 set forth in SEQ ID NO:3 with chimpanzee PH20 set forth in SEQ ID NO:10. FIG. 2B depicts the alignment of a human soluble PH20 set forth in SEQ ID NO:3 with Rhesus monkey PH20 set forth in SEQ ID NO:12. FIG. 2C depicts the alignment of a human soluble PH20 set forth in SEQ ID NO:3 with Cynomolgus monkey PH20 set forth in SEQ ID NO:14. FIG. 2D depicts the alignment of human soluble PH20 set forth in SEQ ID NO:3 with bovine PH20 set forth in SEQ ID NO:16. FIG. 2E depicts the alignment of a human soluble PH20 set forth in SEQ ID NO:3 with mouse PH20 set forth in SEQ ID NO:20. FIG. 2F depicts the alignment of a human soluble PH20 set forth in SEQ ID NO:3 with rat PH20 set forth in SEQ ID NO:22. FIG. 2G depicts the alignment of a human soluble PH20 set forth in SEQ ID NO:3 with rabbit PH20 set forth in SEQ ID NO:24. FIG. 2H depicts the alignment of a human soluble PH20 set forth in SEQ ID NO:3 with guinea pig PH20 set forth in SEQ ID NO:29. FIG. 2I depicts the alignment of a human soluble PH20 set forth in SEQ ID NO:3 with Fox PH20 set forth in SEQ ID NO:31. FIG. 2J depicts the alignment of a human soluble PH20 set forth in SEQ ID NO:3 with Gibbon PH20 set forth in SEQ ID NO:387. FIG. 2K depicts the alignment of a human soluble PH20 set forth in SEQ ID NO:3 with Marmoset PH20 set forth in SEQ ID NO:389. FIG. 2L depicts the alignment of a human soluble PH20 set forth in SEQ ID NO:3 with Orangutan PH20 set forth in SEQ ID NO:391.

### DETAILED DESCRIPTION

### Outline

[0213] A. Definitions
[0214] B. PH20 Hyaluronidase and Thermal Stability
   [0215] 1. Structure
      [0216] Soluble PH20 Polypeptides
   [0217] 2. Function
   [0218] 3. Thermal Stability of PH20 Hyaluronidases
[0219] C. Modified PH20 Polypeptides: Uber-Thermophiles
   [0220] 1. Exemplary Amino Acid Replacements
   [0221] 2. Nucleic Acid Molecules
   [0222] 3. Additional Modifications and Conjugates
      [0223] a. Decreased Immunogenicity
      [0224] b. Conjugation to Polymers
[0225] D. Methods for Identifying Modified Thermally Stable Hyaluronan-Degrading Enzymes
   [0226] 1. Hyaluronan-Degrading Enzymes and Libraries of Modified Hyaluronan-Degrading Enzymes
   [0227] 2. Screening or Testing for Activity Under Thermal Stress Conditions
   [0228] 3. Selection or Identification
   [0229] 4. Iterative Methods
[0230] E. Production of Modified Polypeptides and Encoding Nucleic Acid Molecules
   [0231] 1. Isolation or Preparation of Nucleic Acids Encoding PH20 Polypeptides
   [0232] 2. Generation of Mutant or Modified Nucleic Acid and Encoding Polypeptides
   [0233] 3. Vectors and Cells
   [0234] 4. Expression
      [0235] a. Prokaryotic Cells
      [0236] b. Yeast Cells
      [0237] c. Insects and Insect Cells
      [0238] d. Mammalian expression
      [0239] e. Plants and plant cells
   [0240] 5. Purification
   [0241] 6. Modification of Polypeptides by PEGylation
[0242] F. Pharmaceutical Compositions and Formulations, Dosages and Administration
   [0243] 1. Formulations (liquids, injectables, solutions and emulsions)
   [0244] a. Lyophilized
   [0245] b. Exemplary Formulations
      [0246] i. pH and Buffer
      [0247] ii. Salt (e.g. NaCl)
      [0248] iii. Preservatives
      [0249] iv. Stabilizers
   [0250] 2. Compositions for Other Routes of Administration
   [0251] 3. Dosages and Administration
   [0252] 4. Combinations and Co-Formulations with Therapeutic Agents
   [0253] 5. Packaging, Articles of Manufacture and Kits
[0254] G. Methods of Assessing Hyaluronidase Activity
   [0255] 1. Hyaluronidase Activity
   [0256] 2. Thermal Stability
   [0257] Solubility
   [0258] 3. Other Assays to Assess Stability
   [0259] 4. Solubility
   [0260] 5. Pharmacodynamics/Pharmacokinetics
[0261] H. Methods of Treatment and Combination Therapy
   [0262] 1. Methods of Delivering Therapeutic Agents
   [0263] 2. Methods of Treating Hyaluronan-Associated Disease and Conditions
   [0264] 3. Other Uses
[0265] I. Examples

### A. DEFINITIONS

[0266] Unless defined otherwise, all technical and scientific terms used herein have the same meaning as is commonly understood by one of skill in the art to which the invention(s) belong. All patents, patent applications, published applications and publications, Genbank sequences, databases, websites and other published materials referred to throughout the entire disclosure herein, unless noted otherwise, are incorporated by reference in their entirety. In the event that there are a plurality of definitions for terms herein, those in this section prevail. Where reference is made to a URL or other such identifier or address, it understood that such identifiers can change and particular information on the internet can come and go, but equivalent information can be found by searching the internet. Reference thereto evidences the availability and public dissemination of such information.

[0267] As used herein, a hyaluronan-degrading enzyme refers to an enzyme that catalyzes the cleavage of a hyaluronan polymer (also including hyaluronic acid; (HA)) into smaller molecular weight fragments. Exemplary hyaluronan-degrading enzymes are hyaluronidases, and also include particular chondroitinases and lyases that have the ability to depolymerize a hyaluronan polymer. Exemplary chondroitinases that are hyaluronan-degrading enzymes include, but are not limited to, chondroitin ABC lyase (also known as chondroitinase ABC), chondroitin AC lyase (also known as chondroitin sulfate lyase or chondroitin sulfate eliminase) and chondroitin C lyase. Chondroitin ABC lyase contains two enzymes, chondroitin-sulfate-ABC endolyase (EC 4.2.2.20) and chondroitin-sulfate-ABC exolyase (EC 4.2.2.21). An exemplary chondroitin-sulfate-ABC endolyases and chondroitin-sulfate-ABC exolyases include, but are not limited to, those from Proteus vulgaris and Pedobacter heparinus (the Proteus vulgaris chondroitin-sulfate-ABC endolyase is set forth in SEQ ID NO:452; Sato et al. (1994) Appl. Microbiol. Biotechnol. 41(1):39-46). Exemplary chondroitinase AC enzymes from bacteria include, but are not limited to, those from Pedobacter heparinus, set forth in SEQ ID NO: 453, Victivallis vadensis, set forth in SEQ ID NO:454, and Arthrobacter aurescens (Tkalec et al. (2000) Applied and Environmental Microbiology 66(1):29-35; Ernst et al. (1995) Critical Reviews in Biochemistry and Molecular Biology 30(5):387-444). Exemplary chondroitinase C enzymes from bacteria include, but are not limited to, those from Streptococcus and Flavobacterium (Hibi et al. (1989) FEMS-Microbiol-Lett. 48(2):121-4; Michelacci et al. (1976) J. Biol. Chem. 251:1154-8; Tsuda et al. (1999) Eur. J. Biochem. 262:127-133).

[0268] As used herein, hyaluronidase area hyaluronan degrading enzymes and refers to a class of enzymes hyaluronan degrading enzymes that degrade hyaluronan. Hyaluronidases include, but are not limited to, bacterial hyaluronidases (EC 4.2.2.1 or EC 4.2.99.1), hyaluronidases from leeches, other parasites and crustaceans (EC 3.2.1.36), and mammalian-type hyaluronidases (EC 3.2.1.35). Hyaluronidases include any of non-human origin including, but not limited to, murine, canine, feline, leporine, avian, bovine, ovine, porcine, equine, piscine, ranine, bacterial, and any from leeches, other parasites, and crustaceans. Exemplary human hyaluronidases include HYAL1, HYAL2, HYAL3, HYAL4, and PH20. Also included amongst hyaluronidases are soluble hyaluronidases, including, ovine and bovine PH20, and soluble PH20. Exemplary hyaluronidases include any set forth in SEQ ID NOS: 6, 7-31, 69, 70, 71, 72, 387-392, 399-451, mature forms thereof (lacking the signal sequence), or allelic or species variants thereof. Hyaluronidases also include truncated forms thereof that exhibit hyaluronidase activity, including C-terminal truncated variants that are soluble.

[0269] As used herein, PH20 refers to a type of hyaluronidase that occurs in sperm and is neutral-active. PH-20 occurs on the sperm surface, and in the lysosome-derived acrosome, where it is bound to the inner acrosomal membrane. PH20 includes those of any origin including, but not limited to, human, chimpanzee, Cynomolgus monkey, Rhesus monkey, murine, bovine, ovine, guinea pig, rabbit and rat origin. Exemplary PH20 polypeptides, including precursor and mature forms, include those from human (SEQ ID NOS:6 and 7), chimpanzee (SEQ ID NOS:8, 9, 10, 399 and 400), Rhesus monkey (SEQ ID NOS:11 and 12), Cynomolgus monkey (SEQ ID NOS:13 and 14), cow (e.g., SEQ ID NOS:15-18); mouse (SEQ ID NOS:19 and 20); rat (SEQ ID NOS:21 and 22); rabbit (SEQ ID NOS:23 and 24); sheep (SEQ ID NOS:25-27), guinea pig (SEQ ID NOS:28 and 29); fox (SEQ ID NOS: 30 and 31); Gibbon (SEQ ID NOS:387 and 388), Marmoset (SEQ ID NOS:389 and 390) and orangutan (SEQ ID NOS:391 and 392). Reference to PH20 includes precursor PH20 polypeptides and mature PH20 polypeptides (such as those in which a signal sequence has been removed), truncated forms thereof that have activity, and includes allelic variants and species variants, variants encoded by splice variants, and other variants, including polypeptides that have at least 40%, 45%, 50%, 55%, 65%, 70%, 75%, 80%, 85%, 90%, 95%, 96%, 97%, 98%, 99% or more sequence identity to the precursor polypeptides set forth in SEQ ID NO:7, or the mature forms thereof. PH20 polypeptides also include those that contain chemical or posttranslational modifications and those that do not contain chemical or posttranslational modifications. Such modifications include, but are not limited to, PEGylation, albumination, glycosylation, farnysylation, carboxylation, hydroxylation, phosphorylation, and other polypeptide modifications known in the art. Examples of commercially available bovine or ovine soluble hyaluronidases are Vitrase® hyaluronidase (ovine hyaluronidase) and Amphadase® hyaluronidase (bovine hyaluronidase).

[0270] As used herein, a soluble PH20 refers to a polypeptide characterized by its solubility under physiological conditions. Generally, a soluble PH20 lacks all or a portion of a glycophosphatidyl anchor (GPI) attachment sequence, or does not otherwise sufficiently anchor to the cell membrane. For example, a soluble PH20 can be a C-terminally truncated variant of a PH20 lacking a contiguous sequence of amino acids that corresponds to all or a portion of a glycophosphatidyl anchor (GPI) attachment sequence. Upon expression in a cell, a soluble PH20 does not become membrane anchored and is secreted into the medium. Soluble PH20 proteins can be distinguished, for example, by its partitioning into the aqueous phase of a Triton X-114 solution warmed to 37° C. (Bordier et al., (1981) J. Biol. Chem., 256:1604-7). Membrane-anchored, such as lipid anchored hyaluronidases, will partition into the detergent rich phase, but will partition into the detergent-poor or aqueous phase following treatment with Phospholipase-C. Included among soluble PH20 hyaluronidases are membrane anchored hyaluronidases in which one or more regions associated with anchoring of the hyaluronidase to the membrane has been removed or modified, where the soluble form retains hyaluronidase activity. Soluble hyaluronidases include recombinant soluble hyaluronidases and those contained in or purified from natural sources, such as, for example, testes extracts from sheep or cows. Exemplary of such soluble hyaluronidases are soluble human PH20 (SEQ ID NO: 3 or 32-66). Other soluble hyaluronidases include ovine (SEQ ID NO:25-27) and bovine (SEQ ID NO:16 or 18) PH20.

[0271] As used herein, a soluble human PH20 (sHuPH20) includes human PH20 polypeptides that lack a contiguous sequence of amino acids from the C-terminus of a human PH20 such that all or a portion of the glycosylphosphatidylinositol (GPI) anchor sequence (C-terminally truncated PH20 polypeptides) is missing whereby, if expressed in a cell, the polypeptides are secreted, and/or are soluble under physiological conditions. For example, soluble human PH20 polypeptides include C-terminally truncated polypeptides of the human PH20 set forth as SEQ ID NO:6 in its precursor form or in SEQ ID NO:7 in its mature form lacking the signal sequence, or allelic variants thereof (e.g. set forth in any of SEQ ID NOS: 68-72). Solubility can be assessed by any suitable method that demonstrates solubility under physiologic conditions. Exemplary of such methods is the Triton® X-114 assay, that assesses partitioning into the aqueous phase and that is described above. In addition, a soluble human PH20 polypeptide is, if produced in CHO cells, such as CHO-S cells, a polypeptide that is expressed and is secreted into the cell culture medium. Soluble human PH20 polypeptides, however, are not limited to those produced in CHO cells, but can be produced in any cell or by any method, including recombinant expression and polypeptide synthesis. Reference to secretion by CHO cells is definitional. Hence, if a polypeptide could be expressed and secreted by CHO cells and is soluble in the media, i.e., partitions into the aqueous phase when extracted with Triton® X-114, it is a soluble PH20 polypeptide whether or not it is so-produced. The precursor polypeptides for sHuPH20 polypeptides can include a signal sequence, such as a heterologous or non-heterologous (i.e., native) signal sequence. Exemplary of the precursors are those that include a signal sequence, such as the native 35 amino acid signal sequence at amino acid positions 1-35 (see, e.g., amino acids 1-35 of SEQ ID NO:6).

[0272] As used herein, “native” or “wildtype” with reference to a PH20 polypeptide refers to a PH20 polypeptide encoded by a native or naturally occurring PH20 gene, including allelic variants, that is present in an organism, including a human and other animals, in nature. Reference to wild-type PH20 without reference to a species is intended to encompass any species of a wild-type PH20. Included among wild-type PH20 polypeptides are the encoded precursor polypeptide, fragments thereof, and processed forms thereof, such as a mature form lacking the signal peptide as well as any pre- or post-translationally processed or modified forms thereof. Also included among native PH20 polypeptides are those that are post-translationally modified, including, but not limited to, those that are modified by glycosylation, carboxylation and/or hydroxylation. The amino acid sequences of exemplary wild-type human PH20 are set forth in SEQ ID NOS: 6 and 7 and those of allelic variants, including mature forms thereof, are set forth in SEQ ID NOS:68-72. Other animals produce native PH20, including, but not limited to, native or wildtype sequences set forth in any of SEQ ID NOS: 8-31, 387-392, 399 or 400.

[0273] As used herein, modification refers to modification of a sequence of amino acid residues of a polypeptide or a sequence of nucleotides in a nucleic acid molecule and includes deletions, insertions, and replacements of amino acids and nucleotides, respectively. Modifications also can include post-translational modifications or other changes to the molecule that can occur due to conjugation or linkage, directly or indirectly, to another moiety. Methods of modifying a polypeptide are routine to those of skill in the art, such as by using recombinant DNA methodologies.

[0274] As used herein, “deletion,” when referring to modification of a nucleic acid or polypeptide sequence, refers to the deletion of one or more nucleotides or amino acids compared to a sequence, such as a target polynucleotide or polypeptide or a native or wild-type sequence.

[0275] As used herein, “insertion” when referring to modification of a nucleic acid or amino acid sequence, describes the inclusion of one or more additional nucleotides or amino acids, within a target, native, wild-type or other related sequence. Thus, a nucleic acid molecule that contains one or more insertions compared to a wild-type sequence, contains one or more additional nucleotides within the linear length of the sequence. As used herein, “additions,” to nucleic acid and amino acid sequences describe addition of nucleotides or amino acids onto either termini compared to another sequence.

[0276] As used herein, “substitution” or “replacement” with respect to a modification refers to the replacing of one or more nucleotides or amino acids in a native, target, wild-type or other nucleic acid or polypeptide sequence with an alternative nucleotide or amino acid, without changing the length (as described in numbers of residues) of the molecule. Thus, one or more substitutions in a molecule does not change the number of amino acid residues or nucleotides of the molecule Amino acid replacements compared to a particular polypeptide can be expressed in terms of the number of the amino acid residue along the length of the polypeptide sequence or a reference polypeptide sequence. For example, a modified polypeptide having a modification in the amino acid at the 19^{th} position of the amino acid sequence that is a substitution of Isoleucine (Ile; I) for cysteine (Cys; C) can be expressed as “replacement with Cys or C at a position corresponding to position 19,” I19C, Ile19Cys, or simply C19, to indicate that the amino acid at the modified 19^{th} position is a cysteine. In this example, the molecule having the substitution has a modification at Ile 19 of the unmodified polypeptide.

[0277] As used herein, a “modified hyaluronan-degrading enzyme” refers to a hyaluronan-degrading enzyme that contains a modification compared to a reference or unmodified hyaluronan-degrading enzyme. The modification can be an amino acid replacement (substitution), insertion (addition) or deletion of one or more amino acid residues. The amino acid residue can be a natural or non-natural amino acid. In some cases, the modification can be a post-translational modification. A modified hyaluronan-degrading enzyme can have up to 150 amino acid differences compared to a reference or unmodified hyaluronan-degrading enzyme, so long as the resulting modified hyaluronan-degrading enzyme exhibits hyaluronidase activity. Typically, a modified hyaluronan-degrading enzyme contains 1, 2, 3, 4, 5, 6, 7, 8, 9, 10, 11, 12, 13, 14, 15, 16, 17, 18, 19, 20, 21, 22, 23, 24, 25, 26, 27, 28, 29, 30, 31, 32, 33, 34, 35, 36, 37, 38, 39, 40, 41, 42, 43, 44, 45, 46, 47, 48, 49, or 50 amino acid modifications.

[0278] As used herein, an unmodified hyaluronan-degrading enzyme refers to a starting polypeptide that is selected for modification as provided herein. The starting polypeptide can be a naturally-occurring, wild-type form of a polypeptide. In addition, the starting polypeptide can be altered or mutated, such that it differs from a native wild type isoform but is nonetheless referred to herein as a starting unmodified polypeptide relative to the subsequently modified polypeptides produced herein to have the properties described herein. Thus, existing proteins known in the art that have been modified to have a desired increase or decrease in a particular activity or property compared to an unmodified reference protein can be selected and used as the starting unmodified polypeptide. For example, a protein that has been modified from its native form by one or more single amino acid changes and possesses either an increase or decrease in a desired property, such as a change in an amino acid residue or residues to alter glycosylation, can be selected for modification, and hence referred to herein as unmodified, for further modification. An unmodified hyaluronan-degrading enzyme includes human and non-human hyaluronan-degrading enzymes, including hyaluronan-degrading enzymes from non-human mammals and bacteria. Exemplary unmodified hyaluronan-degrading enzyme are any set forth in SEQ ID NOS: 2, 3, 6, 7-66, 68-72, 387-392, 399-454 or mature, C-terminally truncated forms thereof that exhibit hyaluronidase activity, or a hyaluronan-degrading enzyme that exhibits at least 75%, 80%, 85%, 86%, 87%, 88%, 89%, 90%, 91%, 92%, 93%, 94%, 95%, 96%, 97%, 98%, or 99% sequence identity to any of SEQ ID NOS: 2, 3, 6, 7-66, 68-72, 387-392, 399-454. It is understood that an unmodified hyaluronan-degrading enzyme generally is one that does not contain the modification(s), such as amino acid replacement(s) of a modified hyaluronan-degrading enzyme.

[0279] As used herein, “modified PH20 polypeptide” or “variant PH20 polypeptide” refers to a PH20 polypeptide that contains at least one amino acid modification, such as at least one amino acid replacement as described herein, in its sequence of amino acids compared to a reference unmodified PH20 polypeptide. A modified PH20 polypeptide can have up to 150 amino acid replacements, so long as the resulting modified PH20 polypeptide exhibits hyaluronidase activity. Typically, a modified PH20 polypeptide contains 1, 2, 3, 4, 5, 6, 7, 8, 9, 10, 11, 12, 13, 14, 15, 16, 17, 18, 19, 20, 21, 22, 23, 24, 25, 26, 27, 28, 29, 30, 31, 32, 33, 34, 35, 36, 37, 38, 39, 40, 41, 42, 43, 44, 45, 46, 47, 48, 49, or 50 amino acid replacements. It is understood that a modified PH20 polypeptide also can include any one or more other modifications, in addition to at least one amino acid replacement as described herein.

[0280] As used herein, an unmodified PH20 polypeptide refers to a starting PH20 polypeptide that is selected for modification as provided herein. The starting polypeptide can be a naturally-occurring, wild-type form of a polypeptide. In addition, the starting polypeptide can be altered or mutated, such that it differs from a native wild type isoform but is nonetheless referred to herein as a starting unmodified polypeptide relative to the subsequently modified polypeptides produced herein. Thus, existing proteins known in the art that have been modified to have a desired increase or decrease in a particular activity or property compared to an unmodified reference protein can be selected and used as the starting unmodified polypeptide. For example, a protein that has been modified from its native form by one or more single amino acid changes and possesses either an increase or decrease in a desired property, such as a change in an amino acid residue or residues to alter glycosylation, can be selected for modification, and hence referred to herein as unmodified, for further modification. Exemplary unmodified PH20 polypeptides is a human PH20 polypeptide or allelic or species variants thereof or other variants, including mature and precursor polypeptides. For example, exemplary reference PH20 polypeptides is a mature full length PH20 polypeptide set forth in SEQ ID NOS: 7, 69 or 72, or in C-terminally truncated forms thereof such as set forth in any of SEQ ID NOS: 3 and 32-66, or in a PH20 polypeptide that exhibits at least 68%, 69%, 70%, 75%, 80%, 85%, 86%, 87%, 88%, 89%, 90%, 91%, 92%, 93%, 94%, 95%, 96%, 97%, 98%, or 99% sequence identity to any of SEQ ID NOS: 3, 7, 32-66, 69 or 72. A reference PH20 polypeptide also can include the corresponding precursor form such as set forth in any of SEQ ID NOS: 2, 6, 68, 70 or 71 or other precursor forms, or in a PH20 polypeptide that exhibits at least 68%, 69%, 70%, 75%, 80%, 85%, 86%, 87%, 88%, 89%, 90%, 91%, 92%, 93%, 94%, 95%, 96%, 97%, 98%, or 99% sequence identity to any of SEQ ID NOS: 2, 6, 68, 70 or 71. It is understood that an unmodified hyaluronan-degrading enzyme generally is one that does not contain the modification(s), such as amino acid replacement(s) of a modified hyaluronan-degrading enzyme.

[0281] As used herein, an N-linked moiety refers to an asparagine (N) amino acid residue of a polypeptide that is capable of being glycosylated by post-translational modification of a polypeptide. Exemplary N-linked moieties of human PH20 include amino acids N47, N131, N200, N219, N333 and N358 of the sequence of amino acids set forth in SEQ ID NO: 3 or 7 (corresponding to amino acid residues N82, N166, N235, N254, N368 and N393 of human PH20 set forth in SEQ ID NO: 6).

[0282] As used herein, an N-glycosylated polypeptide refers to a PH20 polypeptide containing oligosaccharide linkage of at least three N-linked amino acid residues, for example, N-linked moieties corresponding to amino acid residues N200, N333 and N358 of SEQ ID NO:3 or 7. An N-glycosylated polypeptide can include a polypeptide where three, four, five and up to all of the N-linked moieties are linked to an oligosaccharide. The N-linked oligosaccharides can include oligomannose, complex, hybrid or sulfated oligosaccharides, or other oligosaccharides and monosaccharides.

[0283] As used herein, an N-partially glycosylated polypeptide refers to a polypeptide that minimally contains an N-acetylglucosamine glycan linked to at least three N-linked moieties. A partially glycosylated polypeptide can include various glycan forms, including monosaccharides, oligosaccharides, and branched sugar forms, including those formed by treatment of a polypeptide with EndoH, EndoF1, EndoF2 and/or EndoF3.

[0284] As used herein, uber-thermophile with reference to a PH20 polypeptide refers to a PH20 polypeptide variant that exhibits at least 50% of its hyaluronidase activity at 52° C. for 10 minutes compared to its activity 4° C. For example, an uber-thermophile refers to a PH20 polypeptide variant that that has a T₅₀ at 10 minutes as determined in a thermal challenge assay of at least or about at least or 52° C. For example, an uber-thermophile can exhibit at least 60%, 65%, 70%, 75%, 80%, 85%, 90%, 95% or more of the activity at 52° C. for 10 minutes compared to its activity at 4° C. An uber-thermophile also generally exhibits at least 40% of the hyaluronidase activity of the corresponding enzyme without the modification(s) or wildype PH20 (e.g. a human PH20 or soluble C-terminal truncated fragment thereof set forth in any of SEQ ID NOS: 3, 7 or 32-66) at 4° C., and greater or increased activity at 52° C. than the same enzyme without the modification(s) and/or wildype PH20 (e.g. a human PH20 or soluble C-terminal truncated fragment thereof set forth in any of SEQ ID NOS: 3, 7 or 32-66). An uber-thermophile also includes PH20 polypeptides that exhibit at least 50% hyaluronidase activity at temperatures greater than 52° C. Thus, the T₅₀ of an uber-thermophile as determined in a thermal challenge assay at 10 minutes can be 52° C., or greater than 52° C., such as greater than 53° C., 54° C., 55° C., 56° C., 57° C., 58° C., 59° C., 60° C., 61° C., 62° C., 63° C., 64° C., 65° C. or greater.

[0285] As used herein, property refers to a physical or structural property, such as the three-dimensional structure, pI, half-life, conformation and other such physical characteristics. For example, a change in a property can be manifested as the solubility, aggregation or crystallization of a protein.

[0286] As used herein, “protein stability” refers to a measure of the maintenance of one or more physical properties of a protein in response to an environmental condition (e.g. an elevated temperature). In one embodiment, the physical property is the maintenance of the covalent structure of the protein (e.g. the absence of proteolytic cleavage, unwanted oxidation or deamidation). In another embodiment, the physical property is the presence of the protein in a properly folded state (e.g. the absence of soluble or insoluble aggregates or precipitates). In one embodiment, stability of a protein is measured by assaying a biophysical property of the protein, for example thermal stability, pH unfolding profile, stable removal of glycosylation, solubility, biochemical function (e.g., ability to bind to a protein (e.g., a ligand, a receptor, an antigen, etc.) or chemical moiety, etc.), and/or combinations thereof. In another embodiment, biochemical function is demonstrated by the binding affinity of an interaction. Stability can be measured using methods known in the art and/or described herein.

[0287] As used herein, an elevated temperature is a temperature that is or is greater than room temperature (e.g. generally greater than 25° C.). Generally, an elevated temperature is a temperature that is at least, greater than, or about 30° C., such as 30° C. to 42° C., and generally 32° C. to 37° C. or 35° C. to 37° C., inclusive.

[0288] As used herein, “stability” or “stable” with reference to a modified PH20 polypeptide or modified hyaluronan-degrading enzyme means that it retains some activity in the presence of an elevated temperature, such as at least 20%, 30%, 40%, 50%, 60%, 70%, 80%, 90% or more of the original or initial hyaluronidase activity prior to exposure to the elevated temperature. Generally, a modified PH20 hyaluronidase is stable if it retains at least 50% or more of the hyaluronidase activity after incubation at an elevated temperature or exposure to an elevated temperature compared to incubation or exposure to a permissive temperature such as a refrigerated temperature (e.g. 2° C.-8° C.). Assays to assess hyaluronidase activity are known to one of skill in the art and described herein. It is understood that the stability of the enzyme need not be permanent or long term, but is manifested for a duration of time in which activity is desired. For example, a modified PH20 hyaluronidase is stable if it exhibits an activity for at least 2 hours, 3 hours, 4 hours, 6 hours, 12 hours, 24 hours, one day, two days, three days, four days, five days, six days, one week, one month, six months or one year upon exposure, or during exposure, to an elevated temperature.

[0289] As used herein, thermal stability refers to the measure of the resistance to denaturation of polypeptide that occurs upon exposure to high or elevated temperatures, and hence is the ability of a protein to function at a particular temperature. A polypeptide is thermally stable at a temperature if it retains at least 50%, 55%, 60%, 65%, 70%, 75%, 80%, 85%, 90%, 95% or more of an activity or a property of the polypeptide at the temperature. Thermal stability can be measured either by known procedures or by the methods described herein. In certain embodiments, thermal stability is evaluated by measuring the melting temperature (Tm) of a protein or by a thermal challenge assay (Tc).

[0290] As used herein, the melting temperature (Tm; also called transition temperature) is the temperature at the midpoint of a thermal transition curve where 50% of molecules of a composition are in a folded state. Hence, it is the temperature at which 50% of a macromolecule becomes denatured, and is a standard parameter for describing the thermal stability of a protein. Methods to determine Tm are well-known to a skilled artisan and include, for example, analytical spectroscopy methods such as, but are not limited to, differential scanning calorimetry (DSC), circular dicroism (CD) spectroscopy), fluorescence emission spectroscopy or nuclear magnetic resonance (NMR) spectroscopy.

[0291] As used herein, a “thermal challenge” assay (or a “thermal gradient” assay) refers to an assay performed by incubation of a protein at a range of temperatures for a set period of time and testing for an activity (e.g. hyaluronidase activity). A thermal challenge assay can be used to determine the temperature for a tested time period at which 50% activity is retained, which is the T₅₀ value (also called the Tc value) for the tested time period. A thermal challenge assay can be performed at any desired time period, and is user determined. As used herein, a thermal stress condition refers to a temperature condition in which an unmodified hyaluronan-degrading enzyme or other reference hyaluronan-degrading enzyme (e.g. wildtype or native) is susceptible to denaturation or degradation, and thus is not stable. For purposes herein, a thermal stress condition is typically a temperature that is or is greater than the melting temperature (Tm) or the T₅₀ value as determined in a thermal challenge assay of an unmodified hyaluronan-degrading enzyme or other reference hyaluronan-degrading enzyme (e.g. wildtype or native). For example, the thermal stress condition can be a temperature that is or is more than 0.5° C., 1° C., 2° C., 3° C., 4° C., 5° C., 6° C., 7° C., 8° C., 9° C., 10° C., 15° C., 20° C. or higher.

[0292] As used herein, “solubility” with reference to a protein refers to a protein that is homogenous in an aqueous solution, whereby protein molecules diffuse and do not sediment spontaneously. Hence a soluble protein solution is one in which there is an absence of a visible or discrete particle in a solution containing the protein, such that the particles cannot be easily filtered. Generally, a protein is soluble if there are no visible or discrete particles in the solution. For example, a protein is soluble if it contains no or few particles that can be removed by a filter with a pore size of 0.22 μm.

[0293] As used herein, aggregation or crystallization with reference to a protein refers to the presence of visible or discrete particles in a solution containing the protein. Typically, the particles are greater than 10 μm in size, such as greater than 15 μm, 20 μm, 25 μm, 30 μm, 40 μm, 50 μm or greater. Aggregation or crystallization can arise due to reduced solubility, increased denaturation of a protein or the formation of covalent bonds.

[0294] As used herein, “increased temperature resistance” or “increased temperature stability” refers to any amount of increased resistance to denaturation caused by elevated temperature of a modified hyalruonan-degrading enzyme (e.g. modified PH20) compared to a corresponding hyaluronan-degrading enzyme not containing the modification. For example, increased temperature resistance can be manifested as an increased thermal stability, such as an increased (i.e. higher) Tm or T₅₀, of the modified hyaluronan-degrading enzyme (e.g. modified PH20) compared to the corresponding hyaluronan-degrading enzyme not containing the modification. In other examples, denaturation is associated with or causes increased crystallization or aggregation, reduced solubility or decreased activity. Hence, resistance to denaturation means that the protein exhibits decreased aggregation or crystallization, increased solubility or increased or greater activity (e.g., hyaluronidase activity) when exposed to a denaturing condition compared to a reference protein (e.g. unmodified enzyme or a protein without the modification(s) that confers the increased resistance/stability). The increased temperature resistance need not be absolute or permanent, but can be achieved because the denaturation of the modified hyaluronan-degrading enzyme occurs more slowly than the unmodified enzyme at the elevated temperature such that an activity or property of the modified hyaluronan-degrading enzyme is achieved for longer. For example, a modified hyaluronan-degrading enzyme, such as a modified PH20 hyaluronidase, exhibits increased temperature resistance if it exhibits, for example, at least or about at least 1%, 2%, 3%, 4%, 5%, 6%, 7%, 8%, 9%, 10%, . . . 20%, . . . 30%, . . . 40%, . . . 50%, . . . 60%, . . . , 70%, . . . 80%, . . . 90%, 91%, 92%, 93%, 94%, 95%, 96%, 97%, 98%, 99%, or 100% more resistance to an elevated temperature than the corresponding unmodified polypeptide to the same temperature. In some instances, a modified polypeptide exhibits 105%, 110%, 120%, 130%, 140%, 150%, 200%, 300%, 400%, 500%, or more increased temperature resistance compared to an unmodified polypeptide. Hence, a modified PH20 hyaluronidase exhibits increased temperature stability if it exhibits at least or about at least 110%, 120%, 130%, 140%, 150%, 160%, 170%, 180%, 190%, 200%, 250%, 300%, 400%, 500%, 600%, 700%, 800%, 900%, 1000% or more of the activity of the unmodified or reference PH20 hyaluronidase when exposed to an elevated temperature for a period of time.

[0295] As used herein, activity refers to a functional activity or activities of a polypeptide or portion thereof associated with a full-length (complete) protein. Functional activities include, but are not limited to, biological activity, catalytic or enzymatic activity, antigenicity (ability to bind or compete with a polypeptide for binding to an anti-polypeptide antibody), immunogenicity, ability to form multimers, and the ability to specifically bind to a receptor or ligand for the polypeptide.

[0296] As used herein, hyaluronidase activity refers to the ability to enzymatically catalyze the cleavage of hyaluronic acid (also named hyaluronan). For example, for a human hyaluronan-degrading enzyme, such as a human PH20, hyaluronidase activity refers to the ability to enzymatically catalyze the cleavage of human hyaluronic acid. The United States Pharmacopeia (USP) XXII assay for hyaluronidase determines hyaluronidase activity indirectly by measuring the amount of higher molecular weight hyaluronic acid, or hyaluronan (HA), substrate remaining after the enzyme is allowed to react with the HA for 30 min at 37° C. (USP XXII-NF XVII (1990) 644-645 United States Pharmacopeia Convention, Inc, Rockville, Md.). A Reference Standard solution can be used in an assay to ascertain the relative activity, in units, of any hyaluronidase. In vitro assays to determine the hyaluronidase activity of hyaluronidases, such as PH20, including modified PH20 polypeptides, are known in the art and described herein. Exemplary assays include the microturbidity assay described herein that measures cleavage of hyaluronic acid by hyaluronidase indirectly by detecting the insoluble precipitate formed when the uncleaved hyaluronic acid binds with serum albumin. Reference Standards can be used, for example, to generate a standard curve to determine the activity in Units of the hyaluronidase being tested.

[0297] As used herein, neutral active refers to the ability of a PH20 polypeptide to enzymatically catalyze the cleavage of hyaluronic acid at neutral pH, such as at a pH between or about between pH 6.0 to pH 7.8.

[0298] As used herein, “refrigeration” with reference to a protein composition refers to storage at a temperature that is 3 to 5° C. (37 to 41° F.).

[0299] As used herein “without refrigeration” or “non-refrigerated” with reference to a protein composition refers to storage at room temperature or ambient temperature. The particular conditions and temperatures are not necessarily constant, and can change or are in flux depending on the locale or setting. For example, temperatures can fluctuate during shipping, handling or other use that can occur without refrigeration. Thus, temperatures achieved without refrigeration include continuous, variable or intermittent temperatures. For example, the temperatures in tropical climates can range from 15-42° C. Generally, without refrigeration, a protein composition can be exposed to elevated temperatures at or greater than 25° C. for some period of time, including temperatures that are at least, greater than, or about 30° C., such as 30° C. to 42° C., and generally 32° C. to 37° C. or 35° C. to 37° C., inclusive.

[0300] As used herein, “room temperature” refers to a range generally from about or at 18° C. to about or at 32° C., and typically in the range of 20° C. to 25° C. It generally is a temperature that exists in a temperature-controlled building. Those of skill in the art appreciate that room temperature varies by location and prevailing conditions. For example, room temperatures can be higher in warmer climates such as Italy or Texas. Also, room temperatures can vary with season, such that a standard room temperature in summer (e.g. 23° C. to 26° C.) can differ from winter (e.g. 19° C. to 21° C.).

[0301] As used herein, “ambient temperature” refers to the temperature of the surroundings, such as occurs during shipping, handling, and other storage of a protein composition. Hence, the ambient temperature can vary within a range from below 0° C. to 42° C. For indoor climates, an ambient temperature can be the same as the room temperature. For outdoor climates, an ambient temperature can be cooler or warmer than the room temperature. Those of skill in the art will appreciate that the ambient temperature varies by location and prevailing conditions. In tropical climates, the ambient temperatures is generally warmer than other climates. The summer ambient temperature is generally warmer than the winter ambient temperature.

[0302] As used herein, a summer ambient temperature reflects temperature extremes that can be encountered during the summer months (e.g. May to September or August to July) such as can occur between the latitudes of 59.9° north and 37.8° south. For example, such temperatures can range from 23° C. to 39° C.

[0303] As used herein, “tropical climate” refers to the climate in the tropic regions near the equator (e.g. such as can occur between the latitudes 23.5° south and 23.5° north) where the mean temperature for all twelve months is typically greater than 18° C., and can be much higher in some cases. For example, in tropical regions like Thar Desert in India, prevailing heat conditions in May and June can be in the range of 46° C. to 50° C. for 5-6 hours per day. Hence, reference to a tropical climate refers to temperatures in the range of 22° C. to 50° C., and generally a daytime temperature of 30° C. to 42° C.

[0304] As used herein, recitation that proteins are “compared under the same conditions” means that different proteins are treated identically or substantially identically such that any one or more conditions that can influence the activity or properties of a protein or agent are not varied or not substantially varied between the test agents. For example, when the hyaluronidase activity of a modified PH20 polypeptide is compared to an unmodified PH20 polypeptide any one or more conditions such as the amount or concentration of the polypeptide; presence, including amount, of excipients, carriers or other components in a formulation other than the active agent (e.g., modified PH20 hyaluronidase); temperature; time of storage; storage vessel; properties of storage (e.g., agitation) and/or other conditions associated with exposure or use are identical or substantially identical between and among the compared polypeptides. Generally, for purposes herein, when comparing proteins only the temperature is varied or different.

[0305] As used herein, “predetermined time” refers to a time that is established or decided in advance. For example, the predetermined time can be a time chosen in advance that is associated with the desired duration of activity of a hyaluronan-degrading enzyme depending on the desired application or use of the protein. A predetermined time can be hours, days, months or years. For example, a predetermined time can be at least about or about 2 hours, 3 hours, 4 hours, 5 hours, 6 hours, 12 hours, 24 hours, 2 days, 3 days, 4 days, 5 days, 6 days, one week, two weeks, three weeks, one month, six months, one year or more.

[0306] As used herein, “storage” means that a formulation is not immediately administered to a subject once prepared, but is kept for a period of time under particular conditions (e.g., particular temperature, time, and/or form (e.g., liquid or lyophilized form)) prior to use. For example, a liquid formulation can be kept or exposed for a period of time (e.g. days or months) prior to administration to a subject to varied temperatures such as refrigerated (0° C. to 10° C., such as 2° C. to 8° C.), room temperature (e.g., temperature up to 32° C., such as 18° C. to about or at 32° C.), or other ambient temperatures that are elevated (e.g., 30° C. to 42° C., such as 32° C. to 37° C. or 35° C. to 37° C.).

[0307] As used herein, an “excipient” refers to a compound in a formulation of an active agent that does not provide the biological effect of the active agent when administered in the absence of the active agent. Exemplary excipients include, but are not limited to, salts, buffers, stabilizers, tonicity modifiers, metals, polymers, surfactants, preservatives, amino acids and sugars.

[0308] As used herein, a stabilizing agent or stabilizer refers to compound added to the formulation to protect the modified PH20 polypeptide or other active agent from degradation, if necessary, such as due to denaturation conditions to which a formulation herein is exposed when handled, stored or used. Thus, included are agents that prevent proteins from degradation from other components in the compositions. Exemplary of such agents are amino acids, amino acid derivatives, amines, sugars, polyols, salts and buffers, surfactants, inhibitors or substrates, proteins (e.g. albumin) and other agents as described herein.

[0309] As used herein, a “buffer” or “buffering agent” refers to a substance, generally a solution, that can keep its pH constant, despite the addition of strong acids or strong bases and external influences of temperature, pressure, volume or redox potential. A buffer prevents change in the concentration of another chemical substance, e.g., proton donor and acceptor systems that prevent marked changes in hydrogen ion concentration (pH). The pH values of all buffers are temperature and concentration dependent. The choice of buffer to maintain a pH value or range can be empirically determined by one of skill in the art based on the known buffering capacity of known buffers. Exemplary buffers include but are not limited to, bicarbonate buffer, cacodylate buffer, phosphate buffer or Tris buffer. For example, Tris buffer (tromethamine) is an amine based buffer that has a pKa of 8.06 and has an effective pH range between 7.9 and 9.2. For Tris buffers, pH increases about 0.03 unit per ° C. temperature decrease, and decreases 0.03 to 0.05 unit per ten-fold dilution.

[0310] As used herein, the residues of naturally occurring α-amino acids are the residues of those 20 α-amino acids found in nature which are incorporated into protein by the specific recognition of the charged tRNA molecule with its cognate mRNA codon in humans.

[0311] As used herein, nucleic acids include DNA, RNA and analogs thereof, including peptide nucleic acids (PNA) and mixtures thereof. Nucleic acids can be single or double-stranded. When referring to probes or primers, which are optionally labeled, such as with a detectable label, such as a fluorescent or radiolabel, single-stranded molecules are contemplated. Such molecules are typically of a length such that their target is statistically unique or of low copy number (typically less than 5, generally less than 3) for probing or priming a library. Generally a probe or primer contains at least 14, 16 or 30 contiguous nucleotides of sequence complementary to or identical to a gene of interest. Probes and primers can be 10, 20, 30, 50, 100 or more nucleic acids long.

[0312] As used herein, a peptide refers to a polypeptide that is from 2 to 40 amino acids in length.

[0313] As used herein, the amino acids which occur in the various sequences of amino acids provided herein are identified according to their known, three-letter or one-letter abbreviations (Table 1). The nucleotides which occur in the various nucleic acid fragments are designated with the standard single-letter designations used routinely in the art.

[0314] As used herein, an “amino acid” is an organic compound containing an amino group and a carboxylic acid group. A polypeptide contains two or more amino acids. For purposes herein, amino acids include the twenty naturally-occurring amino acids, non-natural amino acids and amino acid analogs (i.e., amino acids wherein the α-carbon has a side chain).

[0315] As used herein, “amino acid residue” refers to an amino acid formed upon chemical digestion (hydrolysis) of a polypeptide at its peptide linkages. The amino acid residues described herein are presumed to be in the “L” isomeric form. Residues in the “D” isomeric form, which are so designated, can be substituted for any L-amino acid residue as long as the desired functional property is retained by the polypeptide. NH₂ refers to the free amino group present at the amino terminus of a polypeptide. COOH refers to the free carboxy group present at the carboxyl terminus of a polypeptide. In keeping with standard polypeptide nomenclature described in J. Biol. Chem., 243: 3557-3559 (1968), and adopted 37 C.F.R. §§1.821-1.822, abbreviations for amino acid residues are shown in Table 1:

TABLE 1
Table of Correspondence

SYMBOL

| 1-Letter | 3-Letter | AMINO ACID |
|---|---|---|
| Y | Tyr | Tyrosine |
| G | Gly | Glycine |
| F | Phe | Phenylalanine |
| M | Met | Methionine |
| A | Ala | Alanine |
| S | Ser | Serine |
| I | Ile | Isoleucine |
| L | Leu | Leucine |
| T | Thr | Threonine |
| V | Val | Valine |
| P | Pro | Proline |
| K | Lys | Lysine |
| H | His | Histidine |
| Q | Gln | Glutamine |
| E | Glu | Glutamic Acid |
| Z | Glx | Glu and/or Gln |
| W | Trp | Tryptophan |
| R | Arg | Arginine |
| D | Asp | Aspartic Acid |
| N | Asn | Asparagine |
| B | Asx | Asn and/or Asp |
| C | Cys | Cysteine |
| X | Xaa | Unknown or Other |

[0316] It should be noted that all amino acid residue sequences represented herein by formulae have a left to right orientation in the conventional direction of amino-terminus to carboxyl-terminus. In addition, the phrase “amino acid residue” is broadly defined to include the amino acids listed in the Table of Correspondence (Table 1) and modified and unusual amino acids, such as those referred to in 37 C.F.R. §§1.821-1.822, and incorporated herein by reference. Furthermore, it should be noted that a dash at the beginning or end of an amino acid residue sequence indicates a peptide bond to a further sequence of one or more amino acid residues, to an amino-terminal group such as NH₂ or to a carboxyl-terminal group such as COON.

[0317] As used herein, “naturally occurring amino acids” refer to the 20 L-amino acids that occur in polypeptides.

[0318] As used herein, “non-natural amino acid” refers to an organic compound that has a structure similar to a natural amino acid but has been modified structurally to mimic the structure and reactivity of a natural amino acid. Non-naturally occurring amino acids thus include, for example, amino acids or analogs of amino acids other than the 20 naturally-occurring amino acids and include, but are not limited to, the D-stereoisomers of amino acids. Exemplary non-natural amino acids are described herein and are known to those of skill in the art.

[0319] As used herein, an isokinetic mixture is one in which the molar ratios of amino acids has been adjusted based on their reported reaction rates (see, e.g., Ostresh et al., (1994) Biopolymers 34:1681).

[0320] As used herein, suitable conservative substitutions of amino acids are known to those of skill in the art and can be made generally without altering the biological activity of the resulting molecule. Those of skill in the art recognize that, in general, single amino acid substitutions in non-essential regions of a polypeptide do not substantially alter biological activity (see, e.g., Watson et al. Molecular Biology of the Gene, 4th Edition, 1987, The Benjamin/Cummings Pub. co., p. 224). Such substitutions can be made in accordance with those set forth in TABLE 2 as follows:

TABLE 2

| | Exemplary conservative |
|---|---|
| Original residue | substitution |
| Ala (A) | Gly; Ser |
| Arg (R) | Lys |
| Asn (N) | Gln; His |
| Cys (C) | Ser |
| Gln (Q) | Asn |
| Glu (E) | Asp |
| Gly (G) | Ala; Pro |
| His (H) | Asn; Gln |
| Ile (I) | Leu; Val |
| Leu (L) | Ile; Val |
| Lys (K) | Arg; Gln; Glu |
| Met (M) | Leu; Tyr; Ile |
| Phe (F) | Met; Leu; Tyr |
| Ser (S) | Thr |
| Thr (T) | Ser |
| Trp (W) | Tyr |
| Tyr (Y) | Trp; Phe |
| Val (V) | Ile; Leu |

[0321] Other substitutions also are permissible and can be determined empirically or in accord with known conservative substitutions.

[0322] As used herein, a DNA construct is a single or double stranded, linear or circular DNA molecule that contains segments of DNA combined and juxtaposed in a manner not found in nature. DNA constructs exist as a result of human manipulation, and include clones and other copies of manipulated molecules.

[0323] As used herein, a DNA segment is a portion of a larger DNA molecule having specified attributes. For example, a DNA segment encoding a specified polypeptide is a portion of a longer DNA molecule, such as a plasmid or plasmid fragment, which, when read from the 5′ to 3′ direction, encodes the sequence of amino acids of the specified polypeptide.

[0324] As used herein, the term polynucleotide means a single- or double-stranded polymer of deoxyribonucleotides or ribonucleotide bases read from the 5′ to the 3′ end. Polynucleotides include RNA and DNA, and can be isolated from natural sources, synthesized in vitro, or prepared from a combination of natural and synthetic molecules. The length of a polynucleotide molecule is given herein in terms of nucleotides (abbreviated “nt”) or base pairs (abbreviated “bp”). The term nucleotides is used for single- and double-stranded molecules where the context permits. When the term is applied to double-stranded molecules it is used to denote overall length and will be understood to be equivalent to the term base pairs. It will be recognized by those skilled in the art that the two strands of a double-stranded polynucleotide can differ slightly in length and that the ends thereof can be staggered; thus all nucleotides within a double-stranded polynucleotide molecule cannot be paired. Such unpaired ends will, in general, not exceed 20 nucleotides in length.

[0325] As used herein, “at a position corresponding to” or recitation that nucleotides or amino acid positions “correspond to” nucleotides or amino acid positions in a disclosed or reference sequence, such as set forth in the Sequence listing, refers to nucleotides or amino acid positions identified upon alignment with the disclosed sequence to maximize identity using a standard alignment algorithm, such as the GAP algorithm. SEQ ID NO:3 is an exemplary reference sequence herein. Reference herein that a position or amino acid replacement corresponds to positions with reference to SEQ ID NO:3 also means that the position or amino acid replacement corresponds to positions with reference to any of SEQ ID NOS: 7 or 32-66, since the sequences therein are identical to the corresponding residues as set forth in SEQ ID NO:3. Thus, for purposes herein, alignment of a PH20 sequence is to the amino acid sequence set forth in any of SEQ ID NOS: 3, 7 or 32-66, and in particular SEQ ID NO:3. By aligning the sequences, one skilled in the art can identify corresponding residues, for example, using conserved and identical amino acid residues as guides. In general, to identify corresponding positions, the sequences of amino acids are aligned so that the highest order match is obtained (see, e.g.: Computational Molecular Biology, Lesk, A. M., ed., Oxford University Press, New York, 1988; Biocomputing: Informatics and Genome Projects, Smith, D. W., ed., Academic Press, New York, 1993; Computer Analysis of Sequence Data, Part I, Griffin, A. M., and Griffin, H. G., eds., Humana Press, N.J., 1994; Sequence Analysis in Molecular Biology, von Heinje, G., Academic Press, 1987; and Sequence Analysis Primer, Gribskov, M. and Devereux, J., eds., M Stockton Press, New York, 1991; Carrillo et al. (1988) SIAM J Applied Math 48:1073). FIG. 2 (A-L) exemplifies exemplary alignments and identification of exemplary corresponding residues for replacement.

[0326] As used herein, “sequence identity” refers to the number of identical or similar amino acids or nucleotide bases in a comparison between a test and a reference polypeptide or polynucleotide. Sequence identity can be determined by sequence alignment of nucleic acid or protein sequences to identify regions of similarity or identity. For purposes herein, sequence identity is generally determined by alignment to identify identical residues. Alignment can be local or global, but for purposes herein alignment is generally a global alignment where the full-length of each sequence is compared. Matches, mismatches and gaps can be identified between compared sequences. Gaps are null amino acids or nucleotides inserted between the residues of aligned sequences so that identical or similar characters are aligned. Generally, there can be internal and terminal gaps. Sequence identity can be determined by taking into account gaps as the number of identical residues/length of the shortest sequence×100. When using gap penalties, sequence identity can be determined with no penalty for end gaps (e.g., terminal gaps are not penalized). Alternatively, sequence identity can be determined without taking into account gaps as the number of identical positions/length of the total aligned sequence×100.

[0327] As used herein, a “global alignment” is an alignment that aligns two sequences from beginning to end, aligning each letter in each sequence only once. An alignment is produced, regardless of whether or not there is similarity or identity between the sequences. For example, 50% sequence identity based on “global alignment” means that in an alignment of the full sequence of two compared sequences each of 100 nucleotides in length, 50% of the residues are the same. It is understood that global alignment also can be used in determining sequence identity even when the length of the aligned sequences is not the same. The differences in the terminal ends of the sequences will be taken into account in determining sequence identity, unless the “no penalty for end gaps” is selected. Generally, a global alignment is used on sequences that share significant similarity over most of their length. Exemplary algorithms for performing global alignment include the Needleman-Wunsch algorithm (Needleman et al. J. Mol. Biol. 48: 443 (1970)). Exemplary programs for performing global alignment are publicly available and include the Global Sequence Alignment Tool available at the National Center for Biotechnology Information (NCBI) website (ncbi.nlm.nih.gov/), and the program available at deepc2.psi.iastate.edu/aat/align/align.html.

[0328] As used herein, a “local alignment” is an alignment that aligns two sequence, but only aligns those portions of the sequences that share similarity or identity. Hence, a local alignment determines if sub-segments of one sequence are present in another sequence. If there is no similarity, no alignment will be returned. Local alignment algorithms include BLAST or Smith-Waterman algorithm (Adv. Appl. Math. 2: 482 (1981)). For example, 50% sequence identity based on “local alignment” means that in an alignment of the full sequence of two compared sequences of any length, a region of similarity or identity of 100 nucleotides in length has 50% of the residues that are the same in the region of similarity or identity.

[0329] For purposes herein, sequence identity can be determined by standard alignment algorithm programs used with default gap penalties established by each supplier. Default parameters for the GAP program can include: (1) a unary comparison matrix (containing a value of 1 for identities and 0 for non identities) and the weighted comparison matrix of Gribskov et al. Nucl. Acids Res. 14: 6745 (1986), as described by Schwartz and Dayhoff, eds., Atlas of Protein Sequence and Structure, National Biomedical Research Foundation, pp. 353-358 (1979); (2) a penalty of 3.0 for each gap and an additional 0.10 penalty for each symbol in each gap; and (3) no penalty for end gaps. Whether any two nucleic acid molecules have nucleotide sequences or any two polypeptides have amino acid sequences that are at least 80%, 85%, 90%, 95%, 96%, 97%, 98% or 99% “identical,” or other similar variations reciting a percent identity, can be determined using known computer algorithms based on local or global alignment (see e.g., wikipedia.org/wiki/Sequence_alignment_software, providing links to dozens of known and publicly available alignment databases and programs). Generally, for purposes herein sequence identity is determined using computer algorithms based on global alignment, such as the Needleman-Wunsch Global Sequence Alignment tool available from NCBI/BLAST (blast.ncbi.nlm.nih.gov/Blast.cgi?CMD=Web&Page_TYPE=BlastHome); LAlign (William Pearson implementing the Huang and Miller algorithm (Adv. Appl. Math. (1991) 12:337-357)); and program from Xiaoqui Huang available at deepc2.psi.iastate.edu/aat/align/align.html. Generally, when comparing nucleotide sequences herein, an alignment with penalty for end gaps is used. Local alignment also can be used when the sequences being compared are substantially the same length.

[0330] Therefore, as used herein, the term “identity” represents a comparison or alignment between a test and a reference polypeptide or polynucleotide. In one non-limiting example, “at least 90% identical to” refers to percent identities from 90 to 100% relative to the reference polypeptide or polynucleotide. Identity at a level of 90% or more is indicative of the fact that, assuming for exemplification purposes a test and reference polypeptide or polynucleotide length of 100 amino acids or nucleotides are compared, no more than 10% (i.e., 10 out of 100) of amino acids or nucleotides in the test polypeptide or polynucleotide differs from that of the reference polypeptides. Similar comparisons can be made between a test and reference polynucleotides. Such differences can be represented as point mutations randomly distributed over the entire length of an amino acid sequence or they can be clustered in one or more locations of varying length up to the maximum allowable, e.g., 10/100 amino acid difference (approximately 90% identity). Differences also can be due to deletions or truncations of amino acid residues. Differences are defined as nucleic acid or amino acid substitutions, insertions or deletions. Depending on the length of the compared sequences, at the level of homologies or identities above about 85-90%, the result can be independent of the program and gap parameters set; such high levels of identity can be assessed readily, often without relying on software.

[0331] As used herein, an allelic variant or allelic variation references any of two or more alternative forms of a gene occupying the same chromosomal locus. Allelic variation arises naturally through mutation, and can result in phenotypic polymorphism within populations. Gene mutations can be silent (no change in the encoded polypeptide) or can encode polypeptides having altered amino acid sequence. The term “allelic variant” also is used herein to denote a protein encoded by an allelic variant of a gene. Typically the reference form of the gene encodes a wildtype form and/or predominant form of a polypeptide from a population or single reference member of a species. Typically, allelic variants, which include variants between and among species typically have at least 80%, 90% or greater amino acid identity with a wildtype and/or predominant form from the same species; the degree of identity depends upon the gene and whether comparison is interspecies or intraspecies. Generally, intraspecies allelic variants have at least about 80%, 85%, 90% or 95% or greater identity with a wildtype and/or predominant form, including 96%, 97%, 98%, 99% or greater identity with a wildtype and/or predominant form of a polypeptide. Reference to an allelic variant herein generally refers to variations in proteins among members of the same species.

[0332] As used herein, “allele,” which is used interchangeably herein with “allelic variant” refers to alternative forms of a gene or portions thereof. Alleles occupy the same locus or position on homologous chromosomes. When a subject has two identical alleles of a gene, the subject is said to be homozygous for that gene or allele. When a subject has two different alleles of a gene, the subject is said to be heterozygous for the gene. Alleles of a specific gene can differ from each other in a single nucleotide or several nucleotides, and can include modifications such as substitutions, deletions and insertions of nucleotides. An allele of a gene also can be a form of a gene containing a mutation.

[0333] As used herein, species variants refer to variants in polypeptides among different species, including different mammalian species, such as mouse and human. Exemplary of species variants provided herein are primate PH20, such as, but not limited to, human, chimpanzee, macaque, cynomolgus monkey, gibbon, orangutan, or marmoset. Generally, species variants have 70%, 75%, 80%, 85%, 90%, 91%, 92%, 93%, 94%, 95%, 96%, 97%, or 98% sequence identity. Corresponding residues between and among species variants can be determined by comparing and aligning sequences to maximize the number of matching nucleotides or residues, for example, such that identity between the sequences is equal to or greater than 95%, equal to or greater than 96%, equal to or greater than 97%, equal to or greater than 98% or equal to greater than 99%. The position of interest is then given the number assigned in the reference nucleic acid molecule. Alignment can be effected manually or by eye, particularly where sequence identity is greater than 80%.

[0334] As used herein, substantially pure means sufficiently homogeneous to appear free of readily detectable impurities, as determined by standard methods of analysis, such as thin layer chromatography (TLC), gel electrophoresis and high performance liquid chromatography (HPLC), used by those of skill in the art to assess such purity, or sufficiently pure such that further purification would not detectably alter the physical and chemical properties, such as enzymatic and biological activities, of the substance. Methods for purification of the compounds to produce substantially chemically pure compounds are known to those of skill in the art. A substantially chemically pure compound can, however, be a mixture of stereoisomers or isomers. In such instances, further purification might increase the specific activity of the compound.

[0335] As used herein, isolated or purified polypeptide or protein or biologically-active portion thereof is substantially free of cellular material or other contaminating proteins from the cell or tissue from which the protein is derived, or substantially free from chemical precursors or other chemicals when chemically synthesized. Preparations can be determined to be substantially free if they appear free of readily detectable impurities as determined by standard methods of analysis, such as thin layer chromatography (TLC), gel electrophoresis and high performance liquid chromatography (HPLC), used by those of skill in the art to assess such purity, or sufficiently pure such that further purification would not detectably alter the physical and chemical properties, such as enzymatic and biological activities, of the substance. Methods for purification of the compounds to produce substantially chemically pure compounds are known to those of skill in the art. A substantially chemically pure compound, however, can be a mixture of stereoisomers. In such instances, further purification might increase the specific activity of the compound.

[0336] Hence, reference to a substantially purified polypeptide, such as a substantially purified PH20 polypeptide refers to preparations of PH20 proteins that are substantially free of cellular material, includes preparations of proteins in which the protein is separated from cellular components of the cells from which it is isolated or recombinantly-produced. In one embodiment, the term substantially free of cellular material includes preparations of enzyme proteins having less than about 30% (by dry weight) of non-enzyme proteins (also referred to herein as contaminating proteins), generally less than about 20% of non-enzyme proteins or 10% of non-enzyme proteins or less than about 5% of non-enzyme proteins. When the enzyme protein is recombinantly produced, it also is substantially free of culture medium, i.e., culture medium represents less than about or at 20%, 10% or 5% of the volume of the enzyme protein preparation.

[0337] As used herein, the term substantially free of chemical precursors or other chemicals includes preparations of enzyme proteins in which the protein is separated from chemical precursors or other chemicals that are involved in the synthesis of the protein. The term includes preparations of enzyme proteins having less than about 30% (by dry weight), 20%, 10%, 5% or less of chemical precursors or non-enzyme chemicals or components.

[0338] As used herein, synthetic, with reference to, for example, a synthetic nucleic acid molecule or a synthetic gene or a synthetic peptide refers to a nucleic acid molecule or polypeptide molecule that is produced by recombinant methods and/or by chemical synthesis methods.

[0339] As used herein, production by recombinant means or using recombinant DNA methods means the use of the well known methods of molecular biology for expressing proteins encoded by cloned DNA.

[0340] As used herein, vector (or plasmid) refers to discrete elements that are used to introduce a heterologous nucleic acid into cells for either expression or replication thereof. The vectors typically remain episomal, but can be designed to effect integration of a gene or portion thereof into a chromosome of the genome. Also contemplated are vectors that are artificial chromosomes, such as yeast artificial chromosomes and mammalian artificial chromosomes. Selection and use of such vehicles are well known to those of skill in the art.

[0341] As used herein, an expression vector includes vectors capable of expressing DNA that is operatively linked with regulatory sequences, such as promoter regions, that are capable of effecting expression of such DNA fragments. Such additional segments can include promoter and terminator sequences, and optionally can include one or more origins of replication, one or more selectable markers, an enhancer, a polyadenylation signal, and the like. Expression vectors are generally derived from plasmid or viral DNA, or can contain elements of both. Thus, an expression vector refers to a recombinant DNA or RNA construct, such as a plasmid, a phage, recombinant virus or other vector that, upon introduction into an appropriate host cell, results in expression of the cloned DNA. Appropriate expression vectors are well known to those of skill in the art and include those that are replicable in eukaryotic cells and/or prokaryotic cells and those that remain episomal or those which integrate into the host cell genome.

[0342] As used herein, vector also includes “virus vectors” or “viral vectors.” Viral vectors are engineered viruses that are operatively linked to exogenous genes to transfer (as vehicles or shuttles) the exogenous genes into cells. Viral vectors include, but are not limited to, adenoviral vectors, retroviral vectors and vaccinia virus vectors.

[0343] As used herein, “operably” or “operatively linked” when referring to DNA segments means that the segments are arranged so that they function in concert for their intended purposes, e.g., transcription initiates downstream of the promoter and upstream of any transcribed sequences. The promoter is usually the domain to which the transcriptional machinery binds to initiate transcription and proceeds through the coding segment to the terminator.

[0344] As used herein, a conjugate refers to a modified PH20 polypeptide linked directly or indirectly to one or more other polypeptides or chemical moieties. Such conjugates include fusion proteins, those produced by chemical conjugates and those produced by any other method whereby at least one modified PH20 polypeptide is linked, directly or indirectly to another polypeptide or chemical moiety so long as the conjugate retains hyaluronidase activity. Exemplary of conjugates provided herein include PH20 polypeptides linked directly or indirectly to a multimerization domain (e.g. an Fc moiety), a toxin, a label or a drug.

[0345] As used herein, a fusion protein refers to a polypeptide encoded by a nucleic acid sequence containing a coding sequence from one nucleic acid molecule and the coding sequence from another nucleic acid molecule in which the coding sequences are in the same reading frame such that when the fusion construct is transcribed and translated in a host cell, the protein is produced containing the two proteins. The two molecules can be adjacent in the construct or separated by a linker polypeptide that contains, 1, 2, 3, or more, but typically fewer than 10, 9, 8, 7, or 6 amino acids. The protein product encoded by a fusion construct is referred to as a fusion polypeptide. Examples of fusion polypeptides include Fc fusions.

[0346] As used herein, a polymer that is conjugated to a modified PH20 polypeptide refers to any polymer that is covalently or otherwise stably linked, directly or via a linker, to such polypeptide. Such polymers, typically increase serum half-life, and include, but are not limited to, sialic moieties, polyethylene glycol (PEG) moieties, dextran, and sugar and other moieties, such as for glycosylation.

[0347] As used herein, the term assessing or determining is intended to include quantitative and qualitative determination in the sense of obtaining an absolute value for the activity of a product, and also of obtaining an index, ratio, percentage, visual or other value indicative of the level of the activity. Assessment can be direct or indirect.

[0348] As used herein, a “composition” refers to any mixture of two or more products or compounds. It can be a solution, a suspension, liquid, powder, a paste, aqueous, non-aqueous, or any combination thereof.

[0349] As used herein, a formulation refers to a composition containing at least one active pharmaceutical or therapeutic agent and one or more excipients.

[0350] As used herein, a co-formulation refers to a composition containing two or more active or pharmaceutical or therapeutic agents and one or more excipients. For example, a co-formulation of a fast-acting insulin and a hyaluronan degrading enzyme contains a fast-acting insulin, a hyaluronan degrading enzyme, and one or more excipients.

[0351] As used herein, “a combination” refers to any association between two or among more items or elements, for example, two or more items that can be used together. Exemplary combinations include, but are not limited to, two or more pharmaceutical compositions, a composition containing two or more active ingredients, such as two modified PH20 polypeptides; a modified PH20 polypeptide and an anticancer agent, such as a chemotherapeutic compound; a modified PH20 polypeptide and a therapeutic agent (e.g. an insulin); a modified PH20 polypeptide and a plurality therapeutic and/or imaging agents, or any association thereof. Such combinations can be packaged as kits.

[0352] As used herein, a kit is a packaged combination, optionally, including instructions for use of the combination and/or other reactions and components for such use.

[0353] As used herein, a pharmaceutically effective agent or therapeutic agent includes any bioactive agent that can exhibit a therapeutic effect to treat a disease or disorder. Exemplary therapeutic agents are described herein. Therapeutic agents include, but are not limited to, anesthetics, vasoconstrictors, dispersing agents, conventional therapeutic drugs, including small molecule drugs, including, but not limited to, bisphosphonates, and therapeutic proteins, including, but not limited to, insulin, IgG molecules, antibodies, cytokines and coagulation factors.

[0354] As used herein, “insulin” refers to a hormone, precursor or a synthetic or recombinant analog thereof that acts to increase glucose uptake and storage and/or decrease endogenous glucose production. Insulin and analogs thereof are well known to one of skill in the art, including in human and allelic and species variants thereof. Insulin is translated as a precursor polypeptide designated preproinsulin (110 amino acid for human insulin), containing a signal peptide that directs the protein to the endoplasmic reticulum (ER) wherein the signal sequence is cleaved, resulting in proinsulin. Proinsulin is processed further to release a C- or connecting chain peptide (a 31 amino acid C-chain in human insulin). The resulting insulin contains an A-chain (21 amino acid in length in human insulin; set forth in SEQ ID NO:393) and a B-chain (30 amino acid in length in human insulin; set forth in SEQ ID NO:394) which are cross-linked by disulfide bonds. A fully cross-linked human insulin contains three disulfide bridges: one between position 7 of the A-chain and position 7 of the B-chain, a second between position 20 of the A-chain and position 19 of the B-chain, and a third between positions 6 and 11 of the A-chain. Reference to an insulin includes monomeric and multimeric insulins, including hexameric insulins, as well as humanized insulins. Exemplary insulin polypeptides are those of mammalian, including human, origin. Reference to insulin includes preproinsulin, proinsulin and insulin polypeptides in single-chain or two-chain forms, truncated forms thereof that have activity, and includes allelic variants and species variants of human insulin, variants encoded by splice variants, and other variants, such as insulin analogs. An exemplary insulin is human insulin having a sequence of amino acids of the A- and B-chains of human insulin are set forth in SEQ ID NOS: 393 and 394, respectively, and variants or analogs thereof that exhibit at least 80%, 85%, 90%, 91%, 92%, 93%, 94%, 95%, 96%, 97%, 98% or 99% sequence identity thereto to one or both of the A-chain or B-chain and that acts to increase glucose uptake and storage and/or decrease endogenous glucose production.

[0355] As used herein, “fast-acting insulin” refers to any insulin that exhibits peak insulin levels at or about not more than four hours following subcutaneous administration to a subject. Fast-acting insulins include any insulin or any fast-acting insulin composition for acute administration to a diabetic subject in response to an actual, perceived, or anticipated hyperglycemic condition in the subject arising at the time of, or within about four hours following, administration of the fast-acting insulin (such as a prandial hyperglycemic condition resulting or anticipated to result from, consumption of a meal), whereby the fast-acting insulin is able to prevent, control or ameliorate the acute hyperglycemic condition. Fast-acting insulins include recombinant insulins and isolated insulins (also referred to as “regular” insulins) such as the insulin sold as human insulin, porcine insulins and bovine insulins, as well as rapid acting insulin analogs (also termed fast-acting insulin analogs herein) designed to be rapid acting by virtue of amino acid changes. Exemplary regular insulin preparations include, but are not limited to, human regular insulins, such as those sold under the trademarks Humulin® R, Novolin® R and Velosulin®, Insulin Human, USP and Insulin Human Injection, USP, as well as acid formulations of insulin, such as, for example, Toronto Insulin, Old Insulin, and Clear Insulin, and regular pig insulins, such as Iletin II® (porcine insulin) Regular insulins typically have an onset of action of between 30 minutes to an hour, and a peak insulin level of 2-5 hours post administration.

[0356] As used herein, rapid acting insulin analogs (also called fast-acting insulin analogs) are insulins that have a rapid onset of action. Rapid insulins typically are insulin analogs that have been engineered, such as by the introduction of one or more amino acid substitutions, to be more rapid acting than regular insulins. Rapid acting insulin analogs typically have an onset of action of 10-30 minutes post injection, with peak insulin levels observed 30-90 minutes post injection. Exemplary rapid acting insulin analogs are analogs of human insulin containing one or more amino acid changes in the A-chain and/or B-chain of human insulin set forth in SEQ ID NO:393 or 394, respectively, and that exhibit an onset of action 10-30 minutes post injection with peak insulin levels observed 30-90 minutes post injection. Exemplary rapid acting insulin analogs include, but are not limited to, for example, insulin lispro (e.g., Humalog® insulin), insulin aspart (e.g., NovoLog® insulin), and insulin glulisine (e.g., Apidra® insulin) the fast-acting insulin composition sold as VIAject® and VIAtab® (see, e.g., U.S. Pat. No. 7,279,457). The amino acid sequence of exemplary rapid acting insulin analogs have an A chain with a sequence of amino acids set forth in SEQ ID NO:393 and a B chain having a sequence of amino acids set forth in any of SEQ ID NOS:395-397. Also included are any other insulins that have an onset of action of 30 minutes or less and a peak level before 90 minutes, typically 30-90 minutes, post injection.

[0357] As used herein, a human insulin refers to an insulin that is synthetic or recombinantly produced based upon the human polypeptide, including allelic variants and analogs thereof

[0358] As used herein, fast-acting human insulins or human fast-acting insulin compositions include any human insulin or composition of a human insulin that is fast-acting, but excludes non-human insulins, such as regular pig insulin.

[0359] As used herein, “disease or disorder” refers to a pathological condition in an organism resulting from cause or condition including, but not limited to, infections, acquired conditions, genetic conditions, and characterized by identifiable symptoms.

[0360] As used herein, a hyaluronan-associated disease, disorder or condition refers to any disease or condition in which hyaluronan levels are elevated as cause, consequence or otherwise observed in the disease or condition. Hyaluronan-associated diseases and conditions are associated with elevated hyaluronan expression in a tissue or cell, increased interstitial fluid pressure, decreased vascular volume, and/or increased water content in a tissue. For example, such diseases and conditions include, but are not limited to, including cancers, disc pressure and edema. Exemplary diseases and conditions, include, but are not limited to, hyaluronan-rich cancers, for example, tumors, including solid tumors such as late-stage cancers, metastatic cancers, undifferentiated cancers, ovarian cancer, in situ carcinoma (ISC), squamous cell carcinoma (SCC), prostate cancer, pancreatic cancer, non-small cell lung cancer, breast cancer, colon cancer and other cancers. Exemplary hyaluronan-associated diseases and conditions also are diseases that are associated with elevated interstitial fluid pressure, such as diseases associated with disc pressure, and edema, for example, edema caused by organ transplant, stroke, brain trauma or other injury. Hyaluronan-associated diseases, disorders or conditions can be treated by administration of a composition containing a hyaluronan degrading enzyme, such as a hyaluronidase, for example, a soluble hyaluronidase, either alone or in combination with or in addition to another treatment and/or agent. In one example, treatment of the hyaluronan-associated condition, disease or disorder includes amelioration, reduction, or other beneficial effect on one or more of increased interstitial fluid pressure (IFP), decreased vascular volume, and increased water content in a tissue.

[0361] As used herein, “treating” a subject with a disease or condition means that the subject's symptoms are partially or totally alleviated, or remain static following treatment. Hence treatment encompasses prophylaxis, therapy and/or cure. Prophylaxis refers to prevention of a potential disease and/or a prevention of worsening of symptoms or progression of a disease. Treatment also encompasses any pharmaceutical use of a modified interferon and compositions provided herein.

[0362] As used herein, treatment means any manner in which the symptoms of a condition, disorder or disease or other indication, are ameliorated or otherwise beneficially altered.

[0363] As used herein, therapeutic effect means an effect resulting from treatment of a subject that alters, typically improves or ameliorates the symptoms of a disease or condition or that cures a disease or condition. A therapeutically effective amount refers to the amount of a composition, molecule or compound which results in a therapeutic effect following administration to a subject.

[0364] As used herein, the term “subject” refers to an animal, including a mammal, such as a human being.

[0365] As used herein, a patient refers to a human subject exhibiting symptoms of a disease or disorder.

[0366] As used herein, amelioration of the symptoms of a particular disease or disorder by a treatment, such as by administration of a pharmaceutical composition or other therapeutic, refers to any lessening, whether permanent or temporary, lasting or transient, of the symptoms that can be attributed to or associated with administration of the composition or therapeutic.

[0367] As used herein, prevention or prophylaxis refers to methods in which the risk of developing a disease or condition is reduced.

[0368] As used herein, a “therapeutically effective amount” or a “therapeutically effective dose” refers to the quantity of an agent, compound, material, or composition containing a compound that is at least sufficient to produce a therapeutic effect. Hence, it is the quantity necessary for preventing, curing, ameliorating, arresting or partially arresting a symptom of a disease or disorder.

[0369] As used herein, unit dose form refers to physically discrete units suitable for human and animal subjects and packaged individually as is known in the art.

[0370] As used herein, a single dosage formulation refers to a formulation containing a single dose of therapeutic agent for direct administration. Single dosage formulations generally do not contain any preservatives.

[0371] As used herein, “direct administration” refers to formulation of a composition for administration without dilution.

[0372] As used herein, a multi-dose formulation refers to a formulation that contains multiple doses of a therapeutic agent and that can be directly administered to provide several single doses of the therapeutic agent. The doses can be administered over the course of minutes, hours, weeks, days or months. Multidose formulations can allow dose adjustment, dose-pooling and/or dose-splitting. Because multi-dose formulations are used over time, they generally contain one or more preservatives to prevent microbial growth.

[0373] As used herein, “parenteral administration” refers to administration routes that achieve systemic administration. Exemplary parenteral routes of administration include, for example, intravenous, subcutaneous or intramuscular administration.

[0374] As used herein, a “collection” refers to a collection containing at least 10 different proteins and/or active portions thereof, and generally containing at least 50, 100, 500, 1000, 10⁴, 10⁵ or more members. The collections typically contain proteins to be screened for activity. Included in the collections are naturally occurring proteins (or active portions thereof) and/or modified proteins. The modifications include random mutations along the length of the protein and/or modifications in targeted or selected regions (i.e., focused mutations). The modifications can be combinatorial and can include all permutations, by substitution of all amino acids at a particular locus or at all loci or subsets thereof. The collections can include proteins of full length or shorter. The size of the collection and particular collection is determined by the user. The term collection herein is used interchangeably with the term “library” and mean the same thing.

[0375] As used herein, an “article of manufacture” is a product that is made and sold. As used throughout this application, the term is intended to encompass a therapeutic agent with a soluble PH20, such as esPH20, or an esPH20 alone, contained in the same or separate articles of packaging.

[0376] As used herein, fluid refers to any composition that can flow. Fluids thus encompass compositions that are in the form of semi-solids, pastes, solutions, aqueous mixtures, gels, lotions, creams and other such compositions.

[0377] As used herein, a “control” or “standard” refers to a sample that is substantially identical to the test sample, except that it is not treated with a test parameter, or, if it is a plasma sample, it can be from a normal volunteer not affected with the condition of interest. A control also can be an internal control. For example, a control can be a sample, such as a virus, that has a known property or activity.

[0378] As used herein, the singular forms “a,” “an” and “the” include plural referents unless the context clearly dictates otherwise. Thus, for example, reference to “an” agent includes one or more agents.

[0379] As used herein, the term “or” is used to mean “and/or” unless explicitly indicated to refer to alternatives only or the alternatives are mutually exclusive.

[0380] As used herein, ranges and amounts can be expressed as “about” a particular value or range. About also includes the exact amount. Hence “about 5 bases” means “about 5 bases” and also “5 bases.”

[0381] As used herein, “optional” or “optionally” means that the subsequently described event or circumstance does or does not occur, and that the description includes instances where said event or circumstance occurs and instances where it does not. For example, an optionally substituted group means that the group is unsubstituted or is substituted.

[0382] As used herein, the abbreviations for any protective groups, amino acids and other compounds, are, unless indicated otherwise, in accord with their common usage, recognized abbreviations, or the IUPAC-IUB Commission on Biochemical Nomenclature (see, (1972) Biochem. 11:1726).

[0383] For clarity of disclosure, and not by way of limitation, the detailed description is divided into the subsections that follow.

### B. PH20 HYALURONIDASE AND THERMAL STABILITY

[0384] PH20 hyaluronidase (also known as sperm surface protein, sperm adhesion molecule 1 or SPAM1) is a therapeutic protein that acts as a spreading agent to increase subcutaneous delivery of other co-administered agents. PH20 hyaluronidase also exhibits therapeutic activity itself to treat a number of diseases and conditions associated with accumulated hyaluronan (HA) levels, such as a variety of tumors and cancers.

[0385] PH20 exhibits its therapeutic activity by virtue of its ability to hydrolyze hyaluronan (also called hyaluronic acid, hyaluronate or HA), which is found in connective tissues such as the extracellular matrix and is a major constituent of the interstial barrier. Hyaluronan is a non-sulfated glycosaminoglycan that is widely distributed throughout connective, epithelial, and neural tissues. Hyaluronan polymers are composed of repeating disaccharide units, D-glucuronic acid (GlcA) and N-acetyl-D-glucosamine (GlcNAc), linked together via alternating β-1→4 and β-1→3 glycosidic bonds. Hyaluronan chains can reach about 25,000 disaccharide repeats or more in length, and polymers of hyaluronan can range in size from about 5,000 to 20,000,000 Da in vivo. PH20 is an endo-β-N-acetyl-hexosaminidase that hydrolyzes the β1→4 glycosidic bond of hyaluronic acid into various oligosaccharide lengths such as tetrasaccharides and hexasaccharides. PH20 has both hydrolytic and transglycosidase activities. In addition to degrading hyaluronic acid, PH20 also can degrade chondroitin sulfates, such as C4-S and C6-S. PH20 can exhibit hyaluronidase activity at acidic pH and neutral pH.

[0386] PH20 hyaluronidase, however, is susceptible to degradation and denaturation at elevated temperatures. Provided herein are modified PH20 hyaluronidase polypeptides that exhibit stability under thermal stress conditions of about or at least or greater than 52° C. for 10 minutes, and hence are designated uber-thermophiles. By virtue of the thermal stability, the modified PH20 polypeptides provided herein are tolerant to heat and exhibit improved protein thermodynamic stability to extend product shelf life. In addition, the modified PH20 polypeptides permit storage and use in a wider range of temperature conditions. For example, the modified PH20 polypeptides can be employed or stored under conditions in varied climates without refrigeration.

[0387] 1. Structure

[0388] PH20 cDNA has been cloned from numerous mammalian species. Exemplary PH20 precursor polypeptides include, but are not limited to, human (SEQ ID NO:6), bovine (SEQ ID NOS:15 or 17), rabbit (SEQ ID NO:23), Cynomolgus monkey (SEQ ID NO:13), guinea pig (SEQ ID NO:28), rat (SEQ ID NO:21), mouse (SEQ ID NO:19), chimpanzee (SEQ ID NO:8, SEQ ID NO:9 or SEQ ID NO:399), Rhesus monkey (SEQ ID NO:11), fox (SEQ ID NO:30), gibbon (SEQ ID NO:387), marmoset (SEQ ID NO:389) or orangutan (SEQ ID NO:391) PH20 polypeptides. The mRNA transcript is typically translated to generate a precursor protein containing a 35 amino acid signal sequence at the N-terminus. Following transport to the ER, the signal peptide is removed to yield a mature PH20 polypeptide. Exemplary mature PH20 polypeptides include, but are not limited to, human (SEQ ID NO:7), bovine (SEQ ID NOS:16 or 18), rabbit (SEQ ID NO:24), Cynomolgus monkey (SEQ ID NO:14), guinea pig (SEQ ID NO:29), rat (SEQ ID NO:22), mouse (SEQ ID NO:20), chimpanzee (SEQ ID NO:10 or SEQ ID NO:400), Rhesus monkey (SEQ ID NO:12), fox (SEQ ID NO:31), gibbon (SEQ ID NO:388), marmoset (SEQ ID NO:390) or orangutan (SEQ ID NO:392) PH20 polypeptides. For example, the human PH20 mRNA transcript is normally translated to generate a 509 amino acid precursor protein (SEQ ID NO:6) containing a 35 amino acid signal sequence at the N-terminus (amino acid residue positions 1-35 of SEQ ID NO:6). Thus, following transport to the ER and removal of the signal peptide, a 474 amino acid mature polypeptide with an amino acid sequence set forth in SEQ ID NO:7 is produced. Sequences of PH20 from ovine are also known (see e.g., SEQ ID NOS: 25-27).

[0389] In particular, human PH20 has the sequence of amino acids set forth in SEQ ID NO:6. The mature human PH20 lacking a signal sequence is set forth in SEQ ID NO:7. Allelic variants and other variants of PH20 are known. Other sequences of PH20 have been reported. For example, a PH20 variant is known as set forth in the precursor sequence set forth in SEQ ID NO:68 that contains an Ala at position 48 and a Trp at position 499, or the mature sequence thereof set forth in SEQ ID NO:69 containing the corresponding differences at positions 13 and 464, respectively, compared to the sequence set forth in SEQ ID NO:7 (see e.g., Gmachl et al. (1993) FEBS Lett., 336:545-548; GenBank Accession No. AAC60607). Further, a natural variant of PH20 has been identified containing a Glutamine (Gln; Q) at position 5 as compared to the precursor sequence of amino acids set forth in SEQ ID NO:6 (see e.g., SEQ ID NO:70, see also Varela et al. (2011) Nature, 469:539-542). Another natural variant contains an Alanine (Ala; A) at position 47 compared to the sequence of amino acids set forth in SEQ ID NO:6 (as set forth in SEQ ID NO: 71) and corresponding to position 12 compared to the sequence of amino acids set forth in SEQ ID NO: 3 or 7 (as set forth in SEQ ID NO:72).

[0390] The sequence and structure of PH20 polypeptides are highly conserved. Sequence identity between and among PH20 proteins from various species is about 50% to 90%. The hydrophobic N-terminal signal sequence of 35 amino acids in length is generally conserved among PH20 hyaluronidase polypeptides. PH20 hyaluronidases contain a common core hyaluronidase domain region of about 340 amino acids in length that corresponds to amino acid residues 38-374 of the precursor human PH20 sequence set forth in SEQ ID NO:6. A mature PH20 polypeptide lacking the signal sequence and containing a contiguous sequence of amino acids having a C-terminal amino acid residue corresponding to amino acid residue 464 of SEQ ID NO:6 (e.g., amino acid residues corresponding to positions 36-464 of the amino acid sequence set forth in SEQ ID NO:6) is the minimal sequence required for hyaluronidase activity (see e.g., U.S. patent application Ser. No. 10/795,095, which is issued as U.S. Pat. No. 7,767,429; see also U.S. Publication No. US20100143457).

[0391] Within the common hyaluronidase domain region, at least 57 amino acids are conserved between and among species (see e.g., Arming et al. (1997) Eur. J. Biochem., 247:810-814; ten Have et al. (1998) Reprod. Fertil. Dev., 10:165-72; Chowpongpang et al. (2004) Biotechnology Letters, 26:1247-1252). For example, PH20 hyaluronidases contain 12 conserved cysteine residues corresponding to amino acid residue 25, 189, 203, 316, 341, 346, 352, 400, 402, 408, 423 and 429 of the sequence of amino acids of a mature PH20 lacking the signal sequence such as set forth in SEQ ID NO: 7 or set forth in SEQ ID NO:3 or other soluble C-terminal truncated polypeptides (corresponding to amino acid residues 60, 224, 238, 351, 376, 381, 387, 435, 437, 443, 458 and 464 of full-length human PH20 set forth in SEQ ID NO:6). Cysteine residues corresponding to 25 and 316 and cysteine residues corresponding to 189 and 203 form disulfide bridges. The other cysteine residues also form disulfide bridges, are involved in posttranslational protein maturation and/or in activity modulation. For example, further four disulfide bonds are formed between the cysteine residues C376 and C387; between C381 and C435; between C437 and C443; and between C458 and C464 of the polypeptide exemplified in SEQ ID NO:6 (corresponding to positions C341 and C352; between C346 and C400; between C402 and C408; and between C423 and C429, respectively, of the mature polypeptide set forth in SEQ ID NO:3 or 7).

[0392] Amino acid residues corresponding to amino acid residue D111, E113 and E249 of the sequence of amino acids set forth in SEQ ID NO: 3 or 7 (or other mature soluble C-terminally truncated PH20 polypeptides) are acidic residues in the enzyme active site and are conserved between and among PH20 species Amino acid residues corresponding to amino acid residues R176, 8246, 8252 of the sequence of amino acids set forth in SEQ ID NO: 3 or 7 (or other mature soluble C-terminally truncated PH20 polypeptides) are also conserved between and among species and contribute to substrate binding and/or hyaluronidase activity. Amino acid mutations D111N, E113Q, R176G, E249N and R252T result in enzymes that have no detectable enzymatic activity or residual enzymatic activity (see e.g., Arming et al. (1997) Eur. J. Biochem., 247:810-814).

[0393] The Examples herein confirm the requirement of PH20 amino acid residues corresponding to positions 25, 111, 113, 176, 189, 203, 246, 249, 252, 316, 341, 346, 352, 400, 402, 408, 423 and 429 of the sequence of amino acids set forth in a mature PH20 lacking the signal sequence such as set forth in SEQ ID NO: 3 or 7 for hyaluronidase activity, since mutagenesis of these residues results in an enzyme that is not active (e.g., it is not expressed or is inactive when expressed, see e.g., Table 8). The exception is that amino acid replacement corresponding to R176K and C316D resulted in mutants that generated some residual hyaluronidase activity.

[0394] Glycosylation also is required for PH20 hyaluronidase activity based on the recognition motif NxS or NxT. There are six N-linked oligosaccharides at amino acid residues corresponding to positions N47, N131, N200, N219, N333 and N358 of the mature sequence of amino acids set forth in SEQ ID NO: 7 or SEQ ID NO:3 or other soluble C-terminally truncated polypeptide (corresponding to amino acid residues N82, N166, N235, N254, N368 and N393 of human PH20 set forth in SEQ ID NO: 6). In particular, at least N-linked glycosylation sites corresponding to amino acid residues N200, N333 and N358 are required for secretion and/or activity of the enzyme (see e.g., U.S. Publication No. US20100143457). For example, a PH20 polypeptide containing amino acid mutations N200A, N333A, N358A or N333A/N393A result in inactive proteins. Single mutations of glycosylation sites N47A, N131A, N219A, and double mutations of glycosylation sites N47A/N131A, N47A/N219A, N131A/N291A retain activity. The N-linked glycosylation site corresponding to amino acid residue N368 of human PH20 set forth in SEQ ID NO:6 is conserved between and among species (see e.g., Chowpongpang et al. (2004) Biotechnology Letters, 26:1247-1252). PH20 hyaluronidases also contains O-linked glycosylation sites. For example, human PH20 has one O-linked oligosaccharide at the amino acid residue corresponding to amino acid T440 of the sequence of amino acids set forth in SEQ ID NO:3 or 7 (corresponding to amino acid residue T475 in SEQ ID NO:6).

[0395] In addition to the catalytic sites, PH20 also contains a hyaluronan-binding site. This site is located in the Peptide 2 region, which corresponds to amino acid positions 205-235 of the precursor polypeptide set forth in SEQ ID NO:6 and positions 170-200 of the mature polypeptide set forth in SEQ ID NO:3 or 7. This region is highly conserved among hyaluronidases and is similar to the heparin binding motif Mutation of the arginine residue at position 176 (corresponding to the mature PH20 polypeptide set forth in SEQ ID NO:3 or 7) to a glycine results in a polypeptide with only about 1% of the hyaluronidase activity of the wild type polypeptide (Arming et al., (1997) Eur. J. Biochem. 247:810-814).

[0396] PH20 polypeptides contain a glycosyl phosphatidylinositol (GPI) anchor attached to the C-terminus of the protein that anchors the protein to the extracellular leaflet of the plasma membrane of cells. At least human, monkey, mouse and guinea pig PH20 are strongly attached to the plasma membrane via the GPI anchor, which can be released by treating with phosphatidylinositol-specific phospholipase C (PI-PLC; see e.g., Lin et al. (1994) Journal of Cell Biology, 125:1157-1163; Lin et al. (1993) Proc. Natl. Acad. Sci., 90:10071-10075). Other PH20 enzymes, such as bovine PH20, are loosely attached to the plasma membrane and are not anchored via a phospholipase sensitive anchor. As discussed below, soluble active forms that, when expressed, are not attached to the membrane but are secreted can be generated by removal of all of a portion of the GPI anchor attachment signal site (see also U.S. Pat. No. 7,767,429; U.S. Publication No. US20100143457). These include, for example, soluble PH20 polypeptides set forth in any of SEQ ID NOS: 3 or 32-66, or precursor forms thereof containing a signal sequence. It is understood herein that reference to positions herein above in a mature PH20 polypeptide set forth in SEQ ID NO:3 or 7 are the same positions found in the C-terminally truncated polypeptides set forth in SEQ ID NOS:32-66 (see FIG. 1).

[0397] GPI-anchored proteins, for example human PH20, are translated with a cleavable N-terminal signal peptide that directs the protein to the endoplasmic reticulum (ER). At the C-terminus of these proteins is another signal sequence that directs addition of a preformed GPI-anchor to the polypeptide within the lumen of the ER. Addition of the GPI anchor occurs following cleavage of the C-terminal portion at a specific amino acid position, called the ω-site (typically located approximately 20-30 amino acids from the C-terminus). Although there appears to be no consensus sequence to identify the location of the ω-site, GPI anchored proteins contain a C-terminal GPI-anchor attachment signal sequence or domain that typically contains a predominantly hydrophobic region of 8-20 amino acids, preceded by a hydrophilic spacer region of 8-12 amino acids immediately downstream of the ω-site. This hydrophilic spacer region often is rich in charged amino acids and proline (White et al. (2000) J. Cell Sci. 113(Pt.4):721-727). There is generally a region of approximately 11 amino acids before the ω−1 position that is characterized by a low amount of predicted secondary structure, a region around the cleavage site (ω-site), from ω−1 to ω+2 that is characterized by the presence of small side chain residues, the spacer region between positions ω+3 and ω+9, and a hydrophobic tail from ω+10 to the C-terminal end (Pierleoni et al., (2008) BMC Bioinformatics 9:392).

[0398] Although there is no GPI-anchor attachment signal consensus sequence, various in silico methods and algorithms have been developed that can be used to identify such sequences in polypeptides (see, e.g., Udenfriend et al. (1995) Methods Enzymol. 250:571-582; Eisenhaber et al. (1999) J. Mol. Chem. 292: 741-758; Kronegg and Buloz, (1999), “Detection/prediction of GPI cleavage site (GPI-anchor) in a protein (DGPI),” 129.194.185.165/dgpi/; Fankhauser et al. (2005) Bioinformatics 21:1846-1852; Omaetxebarria et al. (2007) Proteomics 7:1951-1960; Pierleoni et al. (2008) BMC Bioinformatics 9:392), including those that are readily available on bioinformatic websites, such as the ExPASy Proteomics tools site (expasy.ch/tools/). Thus, one of skill in the art can determine whether a PH20 polypeptide likely contains a GPI-anchor attachment signal sequence, and, therefore, whether the PH20 polypeptide is a GPI-anchored protein.

[0399] The covalent attachment of a GPI-anchor to the C-terminus of human PH20 and, therefore, the membrane-bound nature of PH20, has been confirmed using phosphatidylinositol-specific phospholipase C (PI-PLC) hydrolysis studies (see e.g., Lin et al., (1994) J. Biol. Chem. 125:1157-1163). Phosphatidylinositol-specific phospholipase C (PI-PLC) and D (PI-PLD) hydrolyze the GPI anchor, releasing the PH20 polypeptide from the cell membrane. The prior art literature reports that a ω-site cleavage site of human PH20 is identified between Ser490 and Ala491 and for monkey PH20 is identified between Ser491 and Thr492 (Lin et al. (1993) Proc. Natl. Acad. Sci, (1993) 90:10071-10075). Thus, the literature reports that a GPI-anchor attachment signal sequence of human PH20 is located at amino acid positions 491-509 of the precursor polypeptide set forth in SEQ ID NO:6, and the w-site is amino acid position 490. Thus, in this modeling of human PH20, amino acids 491-509 are cleaved following transport to the ER and a GPI anchor is covalently attached to the serine residue at position 490.

[0400] Soluble PH20 Polypeptides

[0401] PH20 can exist in membrane-bound or membrane-associated form, or can be secreted into the media when expressed from cells, and thereby can exist in soluble form. Soluble PH20 can be detected and discriminated from insoluble, membrane-bound PH20 using methods well known in the art, including, but not limited to, those using a Triton® X-114 assay. In this assay, soluble PH20 hyaluronidases partition into the aqueous phase of a Triton® X-114 solution warmed to 37° C. (Bordier et al., (1981) J. Biol. Chem., 256:1604-7) while membrane-anchored PH20 hyaluronidases partition into the detergent rich phase. Thus, in addition to using algorithms to assess whether a PH20 polypeptide is naturally GPI-anchored and hence membrane-bound, solubility experiments also can be performed.

[0402] Soluble PH20 enzymes include hyaluronidases that contain a GPI-anchor attachment signal sequence, but that are loosely attached to the membrane such that they do not contain a phospholipase sensitive anchor. For example, soluble PH20 polypeptides include ovine or bovine PH20. Various forms of such soluble PH20 hyaluronidases have been prepared and approved for therapeutic use in subjects, including humans. For example, animal-derived hyaluronidase preparations include Vitrase® (ISTA Pharmaceuticals), a purified ovine testicular hyaluronidase, and Amphadase® (Amphastar Pharmaceuticals), a bovine testicular hyaluronidase. Soluble PH20 enzymes also include C-terminal truncated forms of non-human or human membrane-associated PH20 hyaluronidases that lack one or more amino acid residues of a glycosylphosphatidylinositol (GPI) anchor attachment signal sequence and that retain hyaluronidase activity (see e.g., U.S. Pat. No. 7,767,429; U.S. Publication No. US20100143457). Thus, instead of having a GPI-anchor covalently attached to the C-terminus of the protein in the ER and being anchored to the extracellular leaflet of the plasma membrane, these polypeptides are secreted when expressed from cells and are soluble. In instances where the soluble PH20 retains a portion of the GPI anchor attachment signal sequence, 1, 2, 3, 4, 5, 6, 7, 8, 9, 10 or more amino acid residues in the GPI-anchor attachment signal sequence can be retained, provided the polypeptide is soluble (i.e., secreted when expressed from cells) and active.

[0403] Exemplary soluble hyaluronidases that are C-terminally truncated and lack all or a portion of the GPI anchor attachment signal sequence include, but are not limited to, PH20 polypeptides of primate origin, such as, for example, human and chimpanzee PH20 polypeptides. For example, soluble PH20 polypeptides can be made by C-terminal truncation of a polypeptide set forth in SEQ ID NOS:7, 10, 12, 14, 69, 72, 388, 390, 392 or 400 or variants thereof that exhibit at least 80%, 85%, 90%, 95% or more sequence identity to any of SEQ ID NO: 7, 10, 12, 14, 69, 72, 388, 390, 392 or 400, wherein the resulting polypeptide is active, soluble and lacks all or a portion of amino acid residues from the GPI-anchor attachment signal sequence.

[0404] Exemplary soluble PH20 polypeptides are C-terminal truncated human PH20 polypeptides that are mature (lacking a signal sequence), soluble and exhibit neutral activity, and that contain a contiguous sequence of amino acids set forth in SEQ ID NO:6 or SEQ ID NO:7 that minimally has a C-terminal truncated amino acid residue at or after amino acid residue 464 of the sequence of amino acids set forth in SEQ ID NO:6. For example, soluble PH20 polypeptides include C-terminal truncated polypeptides that minimally contain a contiguous sequence of amino acids 36-464 of SEQ ID NO:6, or includes a sequence of amino acids that has at least 85%, for example at least 86%, 87%, 88%, 89%, 90%, 91%, 92%, 93%, 94%, 95%, 96%, 97%, 98% sequence identity to a contiguous sequence of amino acids that has a C-terminal amino acid residue after amino acid 464 of SEQ ID NO:6 and retains hyaluronidase activity.

[0405] Exemplary C-terminally truncated human PH20 polypeptides are mature polypeptides (lacking a signal sequence) that include a contiguous sequence of amino acids set forth in SEQ ID NO:6 with a C-terminal residue after 464 such as after amino acid position 465, 466, 467, 468, 469, 470, 471, 472, 473, 474, 475, 476, 477, 478, 479, 480, 481, 482, 483, 484, 485, 486, 487, 488, 489, 490, 491, 492, 493, 494, 495, 496, 497, 498, 499 or 500 of the sequence of amino acids set forth in SEQ ID NO:6, or a variant thereof that exhibits at least 85% sequence identity, such as at least 86%, 87%, 88%, 89%, 90%, 91%, 92%, 93%, 94%, 95%, 96%, 97%, 98% sequence identity thereto and retains hyaluronidase activity. For example, exemplary C-terminal PH20 polypeptides have a sequence of amino acids 36 to 465, 466, 467, 468, 469, 470, 471, 472, 473, 474, 475, 476, 477, 478, 479, 480, 481, 482, 483, 484, 485, 486, 487, 488, 489, 490, 491, 492, 493, 494, 495, 496, 497, 498, 499 or 500 of the sequence of amino acids set forth in SEQ ID NO:6, or a variant thereof that exhibits at least 85% sequence identity, such as at least 86%, 87%, 88%, 89%, 90%, 91%, 92%, 93%, 94%, 95%, 96%, 97%, 98% sequence identity thereto and retains hyaluronidase activity. Soluble PH20 polypeptides include any that has the sequence of amino acids set forth in SEQ ID NOS: 3 or 32-66 or a sequence of amino acids that exhibits at least 85% sequence identity, such as at least 86%, 87%, 88%, 89%, 90%, 91%, 92%, 93%, 94%, 95%, 96%, 97%, 98% sequence identity to the sequence of amino acids set forth in any of SEQ ID NOS: 3 or 32-66.

[0406] In particular, a soluble human PH20 polypeptide is a polypeptide that is truncated after amino acid 482 of the sequence set forth in SEQ ID NO:6. Such a polypeptide can be generated from a nucleic acid molecule containing a signal sequence and encoding amino acids 36-482, for example, as set forth in SEQ ID NO:1 (containing an IgG kappa signal sequence) or SEQ ID NO:67 (containing the native signal sequence). Post translational processing removes the signal sequence, leaving a 447 amino acid soluble recombinant human PH20 (SEQ ID NO:3). A product produced upon expression of a vector set forth in SEQ ID NO:4 or 5, and containing a nucleic acid molecule set forth in SEQ ID NO:67, results in a secreted product, designated rHuPH20, in the culture medium that exhibits heterogeneity at the C-terminus such that the product includes a mixture of species that can include any one or more of SEQ ID NOS: 3 and 44-48 in various abundance. Typically, rHuPH20 is produced in cells that facilitate correct N-glycosylation to retain activity, such as mammalian cells, for example CHO cells (e.g., DG44 CHO cells). Hylenex® (Halozyme) is a human recombinant hyaluronidase produced by genetically engineered Chinese Hamster Ovary (CHO) cells containing nucleic acid encoding a truncated human PH20 polypeptide (designated rHuPH20).

[0407] 2. Function

[0408] PH20 is normally expressed in sperm from a single testis-specific gene. PH20 is a sperm-associated protein involved in fertilization. PH20 is normally localized on the sperm surface, and in the lysosome-derived acrosome, where it is bound to the inner acrosomal membrane. PH20 is multifunctional and exhibits hyaluronidase activity, hyaluronan (HA)-mediated cell-signaling activity, and acts as a sperm receptor for the zona pellucida surrounding the oocyte when present on acrosome reacted (AR) sperm. For example, PH20 is naturally involved in sperm-egg adhesion and aids penetration by sperm of the layer of cumulus cells by digesting hyaluronic acid. In addition to being a hyaluronidase, PH20 also appears to be a receptor for HA-induced cell signaling, and a receptor for the zona pellucida surrounding the oocyte. Due to the role of PH20 in fertilization, PH20 can be used as an antigen for immunocontraception.

[0409] PH20 is a neutral active hyaluronidase, although it can exhibit acid-active activity in some cases. The hyaluronidase activity of PH20 is exhibited by the plasma membrane- and inner acrosomal membrane-associated PH20. The plasma membrane PH20 exhibits hyaluronidase activity only at neutral pH, while the inner acrosomal membrane-associated PH20 exhibits acid-active enzyme activity. The structural basis for these differences is due to the presence of two catalytic sites in PH20. A first catalytic site is designated the Peptide 1 region, corresponding to amino acid residues 142-172 of SEQ ID NO:6, which is involved in enzyme activity of PH20 at neutral pH. A second catalytic site is designated the peptide 3 region, corresponding to amino acid residues 277-297 of SEQ ID NO:6, which is involved in enzyme activity at lower pH. A change in the structure of the inner acrosomal membrane-associated PH20 occurs after the acrosome reaction, whereby PH20 is endoproteolytically cleaved but held together by disulfide bonds. The result of the endoproteolysis is that the peptide 3 region is activated and can thus effect neutral and acid-activity to PH20 (see e.g., Cherr et al. (2001) Matrix Biology, 20:515-525. Also, after the acrosome reaction, lower molecular weight forms are generated by release from the inner acrosomal membrane (e.g., a 53 kDa soluble form of PH20 is generated in monkey). The lower molecular weight form(s) also is acid active.

[0410] The hyaluronidase activity of PH20 accounts for the spreading activity observed in animal testes extracts that have been used clinically for decades to increase the dispersion and absorption of drugs (see e.g., Bookbinder et al. (2006) J Controlled Release, 114:230-241). For example, pharmaceutical preparations containing hyaluronidase were developed as fractionated extracts from bovine testes for therapeutic use as spreading agents and in other applications (Schwartzman (1951) J. Pediat., 39:491-502). Original bovine testicular extract preparations included, for example, extracts sold under the trademarks Wydase®, Hylase®, “Dessau,” Neopermease®, Alidase® and Hyazyme®. It is now known that the spreading activity of testicular extract preparations are due to PH20 hyaluronidase activity. For example, in 2001 a sperm hyaluronidase in bull was identified as the hyaluronidase PH20 (Lalancette et al. (2001) Biol. Reprod., 65:628-36). By catalyzing the hydrolysis of hyaluronic acid, PH20 hyaluronidase lowers the viscosity of hyaluronic acid, thereby increasing tissue permeability. Hence, soluble forms of PH20 are used as a spreading or dispersing agent in conjunction with other agents, drug and proteins to enhance their dispersion and delivery, and to improve the pharmacokinetic and pharmacodynamic profile of the coadministered agent, drug or protein (see e.g., U.S. Pat. No. 7,767,429; Bookbinder et al. (2006) J Controlled Release, 114:230-241).

[0411] 3. Thermal Stability of PH20 Hyaluronidases

[0412] PH20 hyaluronidase is not stable at elevated temperatures. As shown in the Examples herein, the Tₘ, of the exemplary soluble PH20 designated rHuPH20 is about 44° C. (see e.g. Example 5). Also, hyaluronidase activity is reduced by about 50% or more upon exposure to temperatures greater than 49° C. for only 10 minutes, with less than 20% activity retained upon exposure to temperatures of 55° C. or higher for only 10 minutes (see Example 6). The temperature profile of PH20 hyaluronidase demonstrates that it is susceptible to denaturation by small increases in temperature.

[0413] The thermal instability of PH20 hyaluronidase can be a problem in developing formulations of PH20 that require storage at high temperatures and/or are otherwise exposed to high temperatures during storage or use (e.g. greater than room temperature or ambient temperatures, such as greater than 30° C., 35° C., 40° C., 45° C. or greater). In particular, temperatures can fluctuate under field conditions in which the therapeutic protein is exposed, such as conditions associated with storage, transport, handling and delivery. These environmental changes are generally not possible to control. For example, refrigeration or temperature control is not always available to the end user of the therapeutic protein, thereby requiring the protein to be stored without refrigeration for prolonged periods of time. This is particularly a concern in areas that experience tropical climates. In addition, routes of administration and certain administration devices also can expose a protein to high temperatures, including fluctuating temperatures. For example, pumps, implantable devices, depot injections and other sustained delivery of proteins can require that a formulation is stable at elevated temperatures of 37° C. or higher over the operational life of the device.

[0414] Although stability of formulations containing PH20 hyaluronidase, or other hyaluronan-degrading enzymes, can be achieved by a variety of stabilizing substances, such substances can adversely affect downstream use of the stored protein or other co-formulated proteins. For example, stabilizing agents (e.g. surfactants and other stabilizing agents) can decrease long term hyaluronidase activity, increase aggregation, increase denaturation and/or promote oxidation. In formulations of PH20 hyaluronidase that are co-formulated with other agents, stabilizing agents also can similarly destabilize the activity, absorption or aggregation of the other agent. These effects can be exacerbated at elevated or fluctuating temperatures. This means that in some cases PH20 hyaluronidase formulations cannot be stored for long term or under high or fluctuating temperature conditions even with a stabilizing agent. In some cases, storage of PH20 hyaluronidase with a stabilizer can necessitate the removal of one or more stabilizing substances before the protein can be used in a downstream process or co-formulated with other agents.

[0415] As a therapeutic agent, however, it is desirable to generate formulations of PH20 hyaluronidase to store for later use or for sustained delivery. It is important that the protein is stored under conditions that preserve the stability of the protein under various conditions including temperature. The modified PH20 polypeptides provided herein are uber-thermophiles that are tolerant to temperatures in which the unmodified PH20 polypeptide is not stable. The following sections describe in further detail uber-thermophile PH20 polypeptides provided herein. Also described below are compositions, combinations, methods and applications of the PH20 uber-thermophile polypeptides.

### C. MODIFIED PH20 POLYPEPTIDES: UBER-THERMOPHILES

[0416] Provided herein are modified or variant PH20 polypeptides that are uber-thermophiles. These uber thermophiles exhibit increased thermostability compared to the unmodified PH20 polypeptide not containing the modification (e.g. a wildtype PH20, such as a full-length mature PH20 or soluble C-terminal truncated fragment thereof). The modified PH20 polypeptides provided herein that are uber thermophiles retain at least 50% of their hyaluronidase activity after incubation at 52 C for 10 minutes compared to the hyaluronidase activity after incubation at 4° C. for 10 minutes. Activity is assessed on a substrate for the unmodified hyaluronidase. For example, among the modified PH20 polypeptides provided herein are polypeptides that retain at least 55%, 60%, 65%, 70%, 75%, 80%, 85%, 90%, 95% or greater of its hyaluronidase activity after incubation at 52° C. for 10 minutes compared to its hyaluronidase activity after incubation at 4° C. for 10 minutes.

[0417] Hence, the modified PH20 polypeptides can be used under conditions that require storage at high temperatures and/or are otherwise exposed to high temperatures during storage or use (e.g. greater than room temperature or ambient temperature, such as greater than 25° C., 30° C., 35° C., 37° C., 40° C., 45° C. or greater). For example, any of the modified PH20 polypeptides provided herein can be stored without refrigeration, including under ambient conditions where temperatures fluctuate (e.g. during transport, delivery or handling) or under tropical climate conditions. In another example, any of the modified PH20 polypeptides provided herein are suitable for use in sustained delivery methods requiring exposure to elevated temperatures greater than 25° C., and typically greater than 30° C., 35° C., 37° C. or higher over the course of use. In any such examples, any of the modified PH20 polypeptides provided herein can exhibit stability (e.g. retain greater than 50% hyaluronidase activity) achieved by exposure to non-refrigerated or ambient temperatures (e.g. greater than 25° C., such as in a range that is 30° C. to 42° C., inclusive, such as at least 30° C. or 37° C. or higher) for at least 72 hours, 96 hours, days, one week, two weeks, three weeks, one month, two months, three months, four months, five months, six months or more.

[0418] The modified PH20 uber-thermophile polypeptides provided herein contain one or more than one modification in an unmodified PH20 polypeptide not containing the modification (e.g. a wildtype PH20, such as a full-length mature PH20 or soluble C-terminal truncated fragment thereof). The modifications can be a single amino acid modification, such as single amino acid replacements (substitutions), insertions or deletions, or multiple amino acid modifications, such as multiple amino acid replacements, insertions or deletions. Exemplary modifications are amino acid replacements, including single or multiple amino acid replacements. The amino acid replacement can be a conservative substitution, such as set forth in Table 2, or a non-conservative substitution, such as any described herein. Modified PH20 polypeptides provided herein can contain at least or 1, 2, 3, 4, 5, 6, 7, 8, 9, 10, 11, 12, 13, 14, 15, 16, 17, 18, 19, 20, or more modified positions compared to the PH20 polypeptide not containing the modification(s). It is understood that in any of such examples, the modified PH20 polypeptide is one that retains at least 50% of its hyaluronidase activity after incubation at 52° C. for 10 minutes compared to its hyaluronidase activity after incubation at 4° C. for 10 minutes.

[0419] The modifications described herein can be in any PH20 polypeptide (i e unmodified PH20), including precursor, mature, or C-terminal truncated forms, so long as the modified form exhibits hyaluronidase activity and retains at least 50% of its hyaluronidase activity after incubation at 52° C. for 10 minutes compared to its hyaluronidase activity after incubation at 4° C. for 10 minutes.

[0420] For example, the PH20 polypeptides contain modifications compared to a wildtype, native or reference PH20 polypeptide set forth in any of SEQ ID NOS: 2, 3, 6-66, 68-72, 387-392, 399 or 400, or in a polypeptide that has a sequence of amino acids that is at least 65%, 70%, 75%, 80%, 85%, 86%, 87%, 88%, 89%, 90%, 91%, 92%, 93%, 94%, 95%, 96%, 97%, 98%, 99% identical to any of SEQ ID NOS: 3, 6-66, 68-72, 387-392, 399 or 400. For example, the modifications are made in a human PH20 polypeptide having the sequence of amino acids including or set forth in SEQ ID NO:7, SEQ ID NO:69 or SEQ ID NO:72; a bovine PH20 polypeptide having a sequence of amino acids including or set forth in SEQ ID NOS:16 or 18; a rabbit PH20 polypeptide having a sequence of amino acids including or set forth in SEQ ID NO:24; a Cynomolgus monkey PH20 polypeptide having a sequence of amino acids including or set forth in SEQ ID NO:14; a guinea pig PH20 polypeptide having a sequence of amino acids including or set forth in SEQ ID NO:29; a rat PH20 polypeptide having a sequence of amino acids including or set forth in SEQ ID NO:22; a mouse PH20 polypeptide having a sequence of amino acids including or set forth in SEQ ID NO:20; a chimpanzee PH20 polypeptide having a sequence of amino acids including or set forth in SEQ ID NO:10 or 400; a Rhesus monkey PH20 polypeptide having a sequence of amino acids including or set forth in SEQ ID NO:12; a Fox PH20 polypeptide having a sequence of amino acids including or set forth in SEQ ID NO:31; a Gibbon PH20 polypeptide having a sequence of amino acids including or set forth in SEQ ID NO:388; a Marmoset PH20 polypeptide having a sequence of amino acids including or set forth in SEQ ID NO: 390; an Orangutan PH20 polypeptide having a sequence of amino acids including or set forth in SEQ ID NO:392; or a sheep PH20 polypeptide having a sequence of amino acids including or set forth in any of SEQ ID NOS: 25-27; or in sequence variants or truncated variants that exhibit at least 65%, 70%, 75%, 80%, 85%, 86%, 87%, 88%, 89%, 90%, 91%, 92%, 93%, 94%, 95%, 96%, 97%, 98%, 99% or more sequence identity to any of SEQ ID NOS: 7, 10, 12, 14, 16, 18, 20, 22, 24-27, 29, 31, 69, 72, 388, 390, 392 or 400.

[0421] In particular, provided herein are modified soluble PH20 polypeptides that are PH20 polypeptides containing a modification (e.g. amino acid replacement) provided herein, and that when expressed from cells are secreted into the media as a soluble protein. For example, the modifications are made in a soluble PH20 polypeptide that is C-terminally truncated within or near the C-terminus portion containing the GPI-anchor signal sequence of a PH20 polypeptide that contains a GPI-anchor signal sequence. The C-terminal truncation can be a truncation or deletion of 8 contiguous amino acids at the C-terminus, 9, 10, 11, 12, 13, 14, 15, 16, 17, 18, 19, 20, 21, 22, 23, 24, 25, 26, 27, 28, 29, 30, 31, 32, 33, 34, 35, 36, 37, 38, 39, 40, 41, 42, 43, 44, 45, 46, 47, 48, 49, 50 or more amino acids at the C-terminus, so long as the resulting C-terminally truncated polypeptide exhibits hyaluronidase activity and is secreted from cells (e.g., into the media) when expressed. In some examples, the modifications provided herein are made in a soluble PH20 polypeptide that is a C-terminally truncated polypeptide of SEQ ID NO:7, 10, 12, 14, 69, 72, 388, 390, 392 or 400 or a variant thereof that exhibits at least 70%, 75%, 80%, 85%, 86%, 87%, 88%, 89%, 90%, 91%, 92%, 93%, 94%, 95%, 96%, 97%, 98%, 99% or more sequence identity to any of SEQ ID NOS: 7, 10, 12, 14, 69, 72, 388, 390, 392 or 400.

[0422] In particular, provided herein are PH20 polypeptides that contain modifications (e.g. amino acid replacements) in a human PH20 polypeptide set forth in SEQ ID NO:7, or soluble C-terminal fragment thereof, or a polypeptide that has a sequence of amino acids that is at least 68%, 70%, 75%, 80%, 85%, 86%, 87%, 88%, 89%, 90%, 91%, 92%, 93%, 94%, 95%, 96%, 97%, 98%, 99% identical to any of SEQ ID NO:7 or a soluble C-terminal fragment thereof. For example, the modifications provided herein are made in a soluble or C-terminally truncated human PH20 polypeptide having the sequence of amino acids set forth in SEQ ID NOS: 3 or 32-66 or a sequence of amino acids that exhibits at least 70%, 75%, 80%, 85%, 86%, 87%, 88%, 89%, 90%, 91%, 92%, 93%, 94%, 95%, 96%, 97%, 98% sequence identity to the sequence of amino acids set forth in any of SEQ ID NOS: 3 or 32-66. For example, modified PH20 polypeptides provided herein contain amino acid replacements or substitutions, additions or deletions, truncations or combinations thereof with reference to the PH20 polypeptide set forth in SEQ ID NO:3. Modifications also can be made in the corresponding precursor form containing a signal peptide of any of SEQ ID NOS: 3, 7, 10, 12, 14, 16, 18, 20, 22, 24-27, 29, 31, 32-66, 69, 72, 388, 390, 392 or 400. For example, modifications provided herein can be made in a precursor form set forth in any of SEQ ID NOS: 2, 6, 8, 9, 11, 13, 15, 17, 19, 21, 23, 28, 30, 387, 389, 391 or 399 or in a variant thereof that exhibits at least 70%, 75%, 80%, 85%, 86%, 87%, 88%, 89%, 90%, 91%, 92%, 93%, 94%, 95%, 96%, 97%, 98%, 99% or more sequence identity to any of SEQ ID NOS: 2, 6, 8, 9, 11, 13, 15, 17, 19, 21, 23, 28, 30, 387, 389, 391 or 399.

[0423] The modified PH20 polypeptides provided herein exhibits at least 85%, 86%, 87%, 88%, 89%, 90%, 91%, 92%, 93%, 94%, 95%, 96%, 97%, 98%, 99% or more sequence identity compared to the unmodified PH20 polypeptide not containing the modification(s), such as an unmodified PH20 polypeptide set forth in any of SEQ ID NOS: 3-66, 68-72, 387-392, 399 or 400. In particular, modified PH20 polypeptides provided herein exhibit at least 85%, 86%, 87%, 88%, 89%, 90%, 91%, 92%, 93%, 94%, 95%, 96%, 97%, 98%, 99% or more sequence identity to a soluble C-terminal truncated human PH20 polypeptide set forth in any of SEQ ID NOS: 3 or 32-66. In examples of modified PH20 polypeptides provided herein, the modified PH20 polypeptide does not contain the sequence of amino acids set forth in any of SEQ ID NOS: 3-66, 68-72, 387-392, 399 or 400. Typically, the modified PH20 polypeptide is modified compared to a human PH20 polypeptide, and does not contain the sequence of amino acids set forth in any of SEQ ID NOS: 8-31, 69, 72, 387-392, 399 or 400.

[0424] Generally, any modification, such as amino acid replacement, deletion or substitution, can be made in a PH20 polypeptide, with the proviso that the modification is not an amino acid replacement where the only modification is a single amino acid replacement that is V12A, N47A, D111N, E113Q, N131A, R176G, N200A, N219A, E249Q, R252T, N333A or N358A. Also, where the modified PH20 polypeptide contains only two amino acid replacements, the amino acid replacements are not P13A/L464W, N47A/N131A, N47A/N219A, N131A/N219A or N333A/N358A. In a further example, where the modified PH20 polypeptide contains only three amino acid replacements, the amino acid replacements are not N47A/N131A/N219A. Exemplary modifications provided herein are described in detail below.

[0425] Typically, the modified PH20 polypeptide exhibits at least 40%, 50%, 60%, 65%, 70%, 75%, 80%, 85%, 90%, 95% or more of the hyaluronidase activity of the unmodified PH20 polypeptide not containing the modification (e.g. a wildtype PH20, such as a full-length mature PH20 or soluble C-terminal truncated fragment thereof) as assessed in a standard hyaluronidase activity assay. Such assays are described in Section G (see also Example 3 and Example 4). It is understood that a standard hyaluronidase assay is performed under conditions and temperatures in which the unmodified PH20 polypeptide is tolerant, such that the polypeptide is not incubated under conditions that result in thermal instability of the polypeptide (e.g. incubation at 52° C. for 10 minutes).

[0426] To retain hyaluronidase activity, modifications typically are not made at those positions that are less tolerant to change or required for hyaluronidase activity. For example, generally modifications are not made at a position corresponding to position 7, 16, 17, 18, 19, 21, 25, 53, 55, 56, 57, 62, 64, 76, 78, 80, 88, 95, 100, 101, 109, 111, 112, 113, 115, 116, 121, 123, 126, 129, 185, 187, 188, 189, 190, 191, 194, 199, 201, 203, 207, 210, 223, 225, 227, 228, 229, 241, 243, 244, 246, 249, 250, 252, 254, 262, 268, 295, 296, 299, 303, 319, 322, 329, 330, 332, 333, 336, 337, 340, 341, 344, 345, 346, 350, 352, 354, 355, 362, 363, 364, 365, 366, 370, 372, 382, 384, 386, 390, 400, 402, 408, 423, 424, 429 or 430, with reference to amino acid positions of the sequence set forth in SEQ ID NO:7 or 3 or other soluble C-terminal truncated fragment. Also, in examples where modifications are made at any of positions 2, 3, 4, 5, 6, 8, 9, 10, 11, 12, 13, 14, 15, 20, 22, 23, 27, 33, 34, 35, 36, 37, 38, 39, 40, 41, 42, 43, 44, 45, 46, 47, 48, 49, 50, 51, 52, 54, 58, 59, 60, 61, 63, 65, 66, 67, 68, 69, 70, 71, 72, 73, 74, 75, 77, 79, 81, 82, 83, 84, 85, 86, 87, 89, 90, 91, 92, 94, 96, 98, 99, 102, 103, 104, 105, 106, 107, 108, 110, 114, 117, 118, 119, 122, 124, 125, 127, 128, 130, 131, 132, 133, 134, 135, 136, 137, 138, 139, 143, 144, 145, 149, 150, 152, 153, 154, 155, 156, 157, 158, 159, 161, 163, 164, 165, 166, 167, 168, 169, 170, 171, 172, 173, 174, 175, 176, 177, 178, 179, 180, 181, 182, 183, 184, 186, 192, 193, 195, 197, 198, 200, 202, 204, 206, 208, 209, 211, 212, 213, 214, 215, 216, 217, 218, 219, 220, 221, 222, 224, 226, 230, 231, 232, 233, 234, 235, 236, 238, 239, 240, 242, 245, 247, 248, 251, 253, 255, 256, 257, 258, 260, 261, 263, 264, 265, 266, 267, 269, 270, 271, 272, 273, 274, 275, 276, 278, 279, 280, 282, 283, 284, 285, 286, 287, 288, 289, 290, 291, 292, 293, 294, 297, 298, 300, 301, 302, 304, 305, 306, 307, 308, 310, 311, 312, 313, 314, 315, 316, 317, 318, 320, 321, 323, 324, 325, 326, 327, 331, 334, 335, 338, 339, 342, 343, 347, 348, 349, 351, 353, 356, 357, 358, 359, 360, 361, 367, 368, 369, 371, 373, 374, 375, 376, 377, 378, 379, 380, 381, 383, 385, 387, 388, 389, 391, 392, 393, 394, 395, 396, 397, 398, 399, 401, 403, 404, 405, 406, 410, 411, 412, 413, 414, 415, 416, 417, 419, 420, 422, 425, 426, 427, 428, 431, 432, 434, 437, 438, 439, 440, 441, 442, 443, 444, or 447 with reference to amino acid positions of the sequence set forth in SEQ ID NO:3, the modification(s) is/are not the corresponding amino acid replacement(s) set forth in Table 8 herein, which are amino acid replacements that result in an inactive polypeptide. For example, if the modification is a modification at a position corresponding to position 2 with reference to SEQ ID NO:3, the modification is not replacement to a histidine (H), lysine (K), tryptophan (W) or tyrosine (Y).

[0427] For purposes herein, reference to positions and amino acids for modification herein, including amino acid replacement or replacements, are with reference to the PH20 polypeptide set forth in SEQ ID NO:3. It is within the level of one of skill in the art to make any of the modifications provided herein in another PH20 polypeptide by identifying the corresponding amino acid residue in another PH20 polypeptide, such as any set forth in SEQ ID NOS: 6, 7, 8, 9, 10, 11, 12, 13, 14, 15, 16, 17, 18, 19, 20, 21, 22, 23, 24-27, 28, 29, 30, 31, 32-66, 68-72, 387-392, 399 or 400 or a variant thereof that exhibits at least 70%, 75%, 80%, 85%, 86%, 87%, 88%, 89%, 90%, 91%, 92%, 93%, 94%, 95%, 96%, 97%, 98%, 99% or more sequence identity to any of SEQ ID NOS: 6, 7, 8, 9, 10, 11, 12, 13, 14, 15, 16, 17, 18, 19, 20, 21, 22, 23, 24-27, 28, 29, 30, 31, 32-66, 68-72, 387-392, 399 or 400. Corresponding positions in another PH20 polypeptide can be identified by alignment of the PH20 polypeptide with the reference to the PH20 polypeptide set forth in SEQ ID NO:3. For example, FIG. 2 (A-L) depicts alignment of exemplary PH20 polypeptides with SEQ ID NO:3, and identification of exemplary corresponding positions. Also, since SEQ ID NOS: 3, 7, 32-66, 69 and 72 are all forms of a mature human PH20 with a different C-terminal amino acid residue, the numbering of amino acid residues in any of SEQ ID NOS: 7, 32-66, 69 and 72 is the same as SEQ ID NO:3, and hence the corresponding residues of each are identical to that set forth in SEQ ID NO:3 (see e.g., FIG. 1). Further, SEQ ID NOS set forth in any of SEQ ID NOS: 2, 6, 70 or 71 are precursor forms thereof that differ by only the presence of a signal sequence.

[0428] For purposes of modification (e.g., amino acid replacement), the corresponding amino acid residue that is replaced can be any amino acid residue, and need not be identical to the residue set forth in SEQ ID NO:3. Typically, the corresponding amino acid residue identified by alignment with residues in SEQ ID NO:3 is an amino acid residue that is identical to SEQ ID NO:3, or is a conservative or semi-conservative amino acid residue thereto (see e.g., FIGS. 2A-2L). It is also understood that the exemplary replacements provided herein can be made at the corresponding residue in a PH20 polypeptide, so long as the replacement is different than exists in the unmodified form of the PH20 polypeptide. Based on this description and the description elsewhere herein, it is within the level of one of skill in the art to generate a modified PH20 polypeptide containing any one or more of the described mutation, and test each for a property or activity as described herein.

[0429] Modifications in a PH20 polypeptide also can be made to a PH20 polypeptide that also contains other modifications, including modifications of the primary sequence and modifications not in the primary sequence of the polypeptide. For example, modifications described herein can be in a PH20 polypeptide that is a fusion polypeptide or chimeric polypeptide. The modified PH20 polypeptides provided herein also include polypeptides that are conjugated to a polymer, such as a PEG reagent.

[0430] In the subsections below, exemplary modified PH20 uber-thermophile polypeptides exhibiting increased thermal stability, and encoding nucleic acid molecules, provided herein are described.

[0431] 1. Exemplary Amino Acid Replacements

[0432] The uber-thermophile PH20 polypeptides provided herein can contain any amino acid replacement or amino acid replacements in an unmodified PH20 polypeptide as set forth in Table 3. For example, the uber-thermophile PH20 polypeptide can contain only a single amino acid replacement in an unmodified PH20 polypeptide as set forth in Table 3. In other examples, the uber-thermophile PH20 polypeptide can contain any two or more, such as three or more, for example at least 4, 5, 6, 7, 8, 9, 10, 11, 12, 13, 14, 15, 16, 17, 18, 19, 20 or more amino acid replacements in an unmodified PH20 polypeptide as set forth in Table 3. The unmodified PH20 polypeptide can be a full-length PH20 or a soluble C-terminal truncated fragment thereof set forth in any of SEQ ID NOS: 3-66, 68-72, 387-392, 399 or 400, or a polypeptide that exhibits at least 85%, 86%, 87%, 88%, 89%, 90%, 91%, 92%, 93%, 94%, 95%, 96%, 97%, 98%, 99% to any of SEQ ID NOS: 3-66, 68-72, 387-392, 399 or 400. In particular the modified PH20 polypeptide is a soluble C-terminal truncated PH20 polypeptide set forth in any of SEQ ID NOS: 3 or 32-66 or exhibits at least 85%, 86%, 87%, 88%, 89%, 90%, 91%, 92%, 93%, 94%, 95%, 96%, 97%, 98%, 99% to any of SEQ ID NOS: 3 or 32-66. Such modified PH20 polypeptides include those that retain at least 50%, 55%, 60%, 65%, 70%, 75%, 80%, 85%, 90%, 95% or greater of its hyaluronidase activity after incubation at 52° C. for 10 minutes compared to its hyaluronidase activity after incubation at 4° C. for 10 minutes (see e.g. Example 7 and Tables 10 and 11).

TABLE 3
Active Mutants

| Corresponding | | Corresponding | | Corresponding | |
|---|---|---|---|---|---|
| Position | Replacement | Position | Replacement | Position | Replacement |
| 10 | G N | 11 | G | 13 | H |
| 15 | A V | 26 | P R S V W Y | 27 | E H |
| 28 | L | 29 | E H L S W | 30 | A P R |
| 31 | C G L | 32 | Q S V W | 33 | G M R W |
| 34 | E H W | 36 | G | 37 | I K |
| 38 | Y | 39 | Q R T | 41 | D T W |
| 46 | H | 47 | G R | 48 | G Y |
| 49 | I | 50 | C D | 58 | K R |
| 60 | K | 67 | F | 69 | A Y |
| 72 | D | 73 | T | 83 | G Q V |
| 84 | D | 86 | D E N R | 87 | M P V |
| 90 | E T W | 92 | V | 93 | E S |
| 94 | N | 97 | E F | 98 | M |
| 99 | S | 102 | H N | 105 | I R W |
| 114 | G | 118 | M | 120 | S |
| 131 | C L | 132 | A C | 135 | Q |
| 138 | W | 139 | R V | 141 | M Q W Y |
| 142 | Q | 143 | K | 144 | G |
| 146 | V | 147 | G I M | 148 | C H K |
| 150 | L | 151 | Q | 152 | A I M T |
| 154 | R | 155 | A D F H L R S V | 156 | A C Q |
| 158 | H | 159 | A H N Q S | 160 | Y |
| 161 | A D | 162 | L | 163 | K R S |
| 165 | F | 170 | R | 174 | W |
| 195 | H L N | 196 | T | 197 | F |
| 198 | L | 202 | M | 204 | P |
| 205 | A E K L P S T | 206 | I | 208 | L Q R |
| 213 | E N | 215 | A D E H T V W | 219 | A R S T |
| 220 | V | 222 | N | 234 | M |
| 235 | T | 237 | Q | 240 | Q |
| 247 | I | 251 | L M | 255 | R |
| 259 | K P | 260 | G M | 261 | A F |
| 263 | T | 265 | I | 271 | V |
| 276 | E | 277 | A C E H | 278 | G H K N |
| 282 | G Q | 284 | A Q S | 285 | M Y |
| 290 | M | 292 | V | 305 | D N |
| 306 | D | 309 | E H L | 310 | Q R |
| 311 | G K | 315 | T | 317 | N |
| 318 | K M N Q | 320 | R | 321 | A H R |
| 328 | L R | 342 | A | 343 | V |
| 349 | A E | 359 | E | 368 | H K |
| 369 | H | 371 | E F M T | 373 | S |
| 374 | A V | 375 | T | 376 | Y |
| 377 | T | 379 | H S T | 380 | I L P T V |
| 388 | H | 389 | K | 393 | L |
| 399 | R W | 401 | G | 403 | F |
| 406 | N | 407 | F H M P Q | 410 | S |
| 412 | G P S | 413 | Q T | 415 | W |
| 417 | L | 419 | L | 421 | I M |
| 428 | P | 431 | A G | 433 | L T |
| 434 | I M | 435 | H | 438 | A |
| 439 | C T | 440 | M | 441 | T V |
| 442 | P | 443 | M | 445 | Y |
| 446 | C D E G | 447 | D E G | | |

[0433] In examples herein, a modified PH20 polypeptide contains an amino acid replacement that is one or more of replacement with: H at a position corresponding to position 27; H at a position corresponding to position 29; W at a position corresponding to position 34; K at a position corresponding to position 37; G at a position corresponding to position 48; K at a position corresponding to position 58; R at a position corresponding to position 58; H at a position corresponding to position 102; Y at a position corresponding to position 141; K at a position corresponding to position 143; G at a position corresponding to position 144; I at a position corresponding to position 147; D at a position corresponding to position 155; N at a position corresponding to position 159; F at a position corresponding to position 165; W at a position corresponding to position 174; P at a position corresponding to position 204; E at a position corresponding to position 213; T at a position corresponding to position 215; A at a position corresponding to position 205; I at a position corresponding to position 206; T at a position corresponding to position 235; A at a position corresponding to position 261; F at a position corresponding to position 261; A at a position corresponding to position 277; C at a position corresponding to position 277; A at a position corresponding to position 284; S at a position corresponding to position 284; D at a position corresponding to position 306; G at a position corresponding to position 311; T at a position corresponding to position 315; H at a position corresponding to position 369; L at a position corresponding to position 380; or S at a position corresponding to position 412, with reference to positions in any of SEQ ID NOS: 3, 7 or 32-66.

[0434] For example, in examples herein, exemplary amino acid replacements in the modified PH20 polypeptides provided herein include, but are not limited to, replacement with: glycine (G) at a position corresponding to position 11; A at a position corresponding to position 15; V at a position corresponding to position 15; R at a position corresponding to position 26; S at a position corresponding to position 26; E at a position corresponding to position 27; H at a position corresponding to position 27; H at a position corresponding to position 29; S at a position corresponding to position 29; A at a position corresponding to position 30; P at a position corresponding to position 30; G at a position corresponding to position 31; L at a position corresponding to position 31; Q at a position corresponding to position 32; W at a position corresponding to position 32; G at a position corresponding to position 33; M at a position corresponding to position 33; R at a position corresponding to position 33; W at a position corresponding to position 33; E at a position corresponding to position 34; H at a position corresponding to position 34; W at a position corresponding to position 34; K at a position corresponding to position 37; Y at a position corresponding to position 38; Q at a position corresponding to position 39; R at a position corresponding to position 39; T at a position corresponding to position 39; D at a position corresponding to position 41; T at a position corresponding to position 41; W at a position corresponding to position 41; G at a position corresponding to position 48; C at a position corresponding to position 50; D at a position corresponding to position 50; K at a position corresponding to position 58; R at a position corresponding to position 58; K at a position corresponding to position 60; F at a position corresponding to position 67; A at a position corresponding to position 69; Y at a position corresponding to position 69; Q at a position corresponding to position 83; D at a position corresponding to position 84; D at a position corresponding to position 86; E at a position corresponding to position 86; R at a position corresponding to position 86; P at a position corresponding to position 87; W at a position corresponding to position 90; V at a position corresponding to position 92; E at a position corresponding to position 93; S at a position corresponding to position 93; N at a position corresponding to position 94; F at a position corresponding to position 97; M at a position corresponding to position 98; S at a position corresponding to position 99; H at a position corresponding to position 102; G at a position corresponding to position 114; M at a position corresponding to position 118; S at a position corresponding to position 120; C at a position corresponding to position 131; L at a position corresponding to position 131; A at a position corresponding to position 132; W at a position corresponding to position 138; R at a position corresponding to position 139; V at a position corresponding to position 139; M at a position corresponding to position 141; Y at a position corresponding to position 141; K at a position corresponding to position 143; G at a position corresponding to position 144; V at a position corresponding to position 146; I at a position corresponding to position 147; M at a position corresponding to position 147; C at a position corresponding to position 148; H at a position corresponding to position 148; K at a position corresponding to position 148; L at a position corresponding to position 150; Q at a position corresponding to position 151; I at a position corresponding to position 152; M at a position corresponding to position 152; T at a position corresponding to position 152; R at a position corresponding to position 154; A at a position corresponding to position 155; D at a position corresponding to position 155; F at a position corresponding to position 155; H at a position corresponding to position 155; L at a position corresponding to position 155; R at a position corresponding to position 155; S at a position corresponding to position 155; H at a position corresponding to position 158; A at a position corresponding to position 159; H at a position corresponding to position 159; N at a position corresponding to position 159; Q at a position corresponding to position 159; S at a position corresponding to position 159; Y at a position corresponding to position 160; A at a position corresponding to position 161; L at a position corresponding to position 162; K at a position corresponding to position 163; R at a position corresponding to position 163; S at a position corresponding to position 163; F at a position corresponding to position 165; W at a position corresponding to position 174; H at a position corresponding to position 195; L at a position corresponding to position 195; T at a position corresponding to position 196; F at a position corresponding to position 197; L at a position corresponding to position 198; P at a position corresponding to position 204; A at a position corresponding to position 205; E at a position corresponding to position 205; K at a position corresponding to position 205; L at a position corresponding to position 205; T at a position corresponding to position 205; I at a position corresponding to position 206; Q at a position corresponding to position 208; R at a position corresponding to position 208; E at a position corresponding to position 213; N at a position corresponding to position 213; E at a position corresponding to position 215; H at a position corresponding to position 215; T at a position corresponding to position 215; N at a position corresponding to position 222; T at a position corresponding to position 235; Q at a position corresponding to position 237; Q at a position corresponding to position 240; I at a position corresponding to position 247; L at a position corresponding to position 251; M at a position corresponding to position 251; K at a position corresponding to position 259; P at a position corresponding to position 259; M at a position corresponding to position 260; A at a position corresponding to position 261; F at a position corresponding to position 261; T at a position corresponding to position 263; V at a position corresponding to position 271; E at a position corresponding to position 276; A at a position corresponding to position 277; C at a position corresponding to position 277; N at a position corresponding to position 278; Q at a position corresponding to position 282; A at a position corresponding to position 284; Q at a position corresponding to position 284; S at a position corresponding to position 284; M at a position corresponding to position 285; V at a position corresponding to position 292; N at a position corresponding to position 305; D at a position corresponding to position 306; R at a position corresponding to position 310; G at a position corresponding to position 311; T at a position corresponding to position 315; N at a position corresponding to position 317; A at a position corresponding to position 321; R at a position corresponding to position 321; L at a position corresponding to position 328; R at a position corresponding to position 328; A at a position corresponding to position 342; H at a position corresponding to position 368; K at a position corresponding to position 368; H at a position corresponding to position 369; F at a position corresponding to position 371; S at a position corresponding to position 373; T at a position corresponding to position 377; H at a position corresponding to position 379; S at a position corresponding to position 379; T at a position corresponding to position 379; I at a position corresponding to position 380; L at a position corresponding to position 380; P at a position corresponding to position 380; T at a position corresponding to position 380; H at a position corresponding to position 388; N at a position corresponding to position 406; F at a position corresponding to position 407; Q at a position corresponding to position 407; S at a position corresponding to position 410; G at a position corresponding to position 412; P at a position corresponding to position 412; S at a position corresponding to position 412; Q at a position corresponding to position 413; M at a position corresponding to position 421; P at a position corresponding to position 428; A at a position corresponding to position 431; L at a position corresponding to position 433; T at a position corresponding to position 433; A at a position corresponding to position 438; C at a position corresponding to position 439; T at a position corresponding to position 441; M at a position corresponding to position 443; Y at a position corresponding to position 445; C at a position corresponding to position 446; D at a position corresponding to position 446; E at a position corresponding to position 446; G at a position corresponding to position 446; E at a position corresponding to position 447; and G at a position corresponding to position 447, with reference to positions in any of SEQ ID NOS: 3, 7 or 32-66.

[0435] For example, in examples herein, a modified PH20 polypeptide contains an amino acid replacement that is one or more of replacement with: H at a position corresponding to position 29; K at a position corresponding to position 37; G at a position corresponding to position 48; R at a position corresponding to position 58; K at a position corresponding to position 143; I at a position corresponding to position 147; N at a position corresponding to position 159; P at a position corresponding to position 204; I at a position corresponding to position 206; T at a position corresponding to position 235; A at a position corresponding to position 261; F at a position corresponding to position 261; A at a position corresponding to position 284; D at a position corresponding to position 306; G at a position corresponding to position 311; T at a position corresponding to position 315; H at a position corresponding to position 369; or S at a position corresponding to position 412, with reference to positions in any of SEQ ID NOS: 3, 7 or 32-66.

[0436] Exemplary amino acid replacements in the modified PH20 polypeptides provided herein include, but are not limited to, replacement with: alanine (A) at a position corresponding to position 15; V at a position corresponding to position 15; R at a position corresponding to position 26; E at a position corresponding to position 27; S at a position corresponding to position 29; G at a position corresponding to position 31; L at a position corresponding to position 31; Q at a position corresponding to position 32; G at a position corresponding to position 33; M at a position corresponding to position 33; R at a position corresponding to position 33; W at a position corresponding to position 33; E at a position corresponding to position 34; H at a position corresponding to position 34; Y at a position corresponding to position 38; R at a position corresponding to position 39; W at a position corresponding to position 41; G at a position corresponding to position 48; C at a position corresponding to position 50; R at a position corresponding to position 58; A at a position corresponding to position 69; D at a position corresponding to position 86; E at a position corresponding to position 86; R at a position corresponding to position 86; W at a position corresponding to position 90; E at a position corresponding to position 93; S at a position corresponding to position 93; F at a position corresponding to position 97; S at a position corresponding to position 99; S at a position corresponding to position 120; L at a position corresponding to position 131; A at a position corresponding to position 132; W at a position corresponding to position 138; R at a position corresponding to position 139; V at a position corresponding to position 139; M at a position corresponding to position 141; Y at a position corresponding to position 141; K at a position corresponding to position 143; V at a position corresponding to position 146; I at a position corresponding to position 147; M at a position corresponding to position 147; C at a position corresponding to position 148; H at a position corresponding to position 148; K at a position corresponding to position 148; L at a position corresponding to position 150; Q at a position corresponding to position 151; I at a position corresponding to position 152; M at a position corresponding to position 152; T at a position corresponding to position 152; R at a position corresponding to position 154; A at a position corresponding to position 155; F at a position corresponding to position 155; L at a position corresponding to position 155; R at a position corresponding to position 155; H at a position corresponding to position 158; H at a position corresponding to position 159; N at a position corresponding to position 159; Q at a position corresponding to position 159; S at a position corresponding to position 159; Y at a position corresponding to position 160; R at a position corresponding to position 163; F at a position corresponding to position 165; W at a position corresponding to position 174; L at a position corresponding to position 198; P at a position corresponding to position 204; A at a position corresponding to position 205; L at a position corresponding to position 205; T at a position corresponding to position 205; I at a position corresponding to position 206; Q at a position corresponding to position 208; R at a position corresponding to position 208; N at a position corresponding to position 213; E at a position corresponding to position 215; T at a position corresponding to position 215; T at a position corresponding to position 235; Q at a position corresponding to position 237; Q at a position corresponding to position 240; L at a position corresponding to position 251; K at a position corresponding to position 259; M at a position corresponding to position 260; A at a position corresponding to position 261; F at a position corresponding to position 261; T at a position corresponding to position 263; V at a position corresponding to position 271; E at a position corresponding to position 276; A at a position corresponding to position 277; C at a position corresponding to position 277; A at a position corresponding to position 284; Q at a position corresponding to position 284; S at a position corresponding to position 284; V at a position corresponding to position 292; N at a position corresponding to position 305; D at a position corresponding to position 306; R at a position corresponding to position 310; T at a position corresponding to position 315; R at a position corresponding to position 328; A at a position corresponding to position 342; K at a position corresponding to position 368; H at a position corresponding to position 369; S at a position corresponding to position 373; H at a position corresponding to position 379; S at a position corresponding to position 379; T at a position corresponding to position 379; I at a position corresponding to position 380; L at a position corresponding to position 380; P at a position corresponding to position 380; T at a position corresponding to position 380; H at a position corresponding to position 388; G at a position corresponding to position 412; P at a position corresponding to position 412; S at a position corresponding to position 412; Q at a position corresponding to position 413; T at a position corresponding to position 433; A at a position corresponding to position 438; T at a position corresponding to position 441; M at a position corresponding to position 443; Y at a position corresponding to position 445; C at a position corresponding to position 446; E at a position corresponding to position 447; and G at a position corresponding to position 447, with reference to positions in any of SEQ ID NOS: 3, 7 or 32-66.

[0437] For example, in examples herein, a modified PH20 polypeptide contains an amino acid replacement that is one or more of replacement with: K at a position corresponding to position 143; I at a position corresponding to position 147; P at a position corresponding to position 204; T at a position corresponding to position 235; A at a position corresponding to position 261; A at a position corresponding to position 284; D at a position corresponding to position 306; T at a position corresponding to position 315; or H at a position corresponding to position 369, with reference to positions in any of SEQ ID NOS: 3, 7 or 32-66.

[0438] In examples herein, exemplary amino acid replacements in the modified PH20 polypeptides provided herein include, but are not limited to, replacement with: alanine (A) at a position corresponding to position 15; V at a position corresponding to position 15; R at a position corresponding to position 26; E at a position corresponding to position 27; S at a position corresponding to position 29; G at a position corresponding to position 31; G at a position corresponding to position 33; M at a position corresponding to position 33; R at a position corresponding to position 33; W at a position corresponding to position 33; E at a position corresponding to position 34; H at a position corresponding to position 34; Y at a position corresponding to position 38; R at a position corresponding to position 39; G at a position corresponding to position 48; R at a position corresponding to position 86; W at a position corresponding to position 90; E at a position corresponding to position 93; S at a position corresponding to position 93; F at a position corresponding to position 97; S at a position corresponding to position 120; L at a position corresponding to position 131; A at a position corresponding to position 132; R at a position corresponding to position 139; M at a position corresponding to position 141; Y at a position corresponding to position 141; K at a position corresponding to position 143; I at a position corresponding to position 147; M at a position corresponding to position 147; C at a position corresponding to position 148; H at a position corresponding to position 148; K at a position corresponding to position 148; M at a position corresponding to position 152; T at a position corresponding to position 152; R at a position corresponding to position 154; A at a position corresponding to position 155; F at a position corresponding to position 155; L at a position corresponding to position 155; N at a position corresponding to position 159; S at a position corresponding to position 159; Y at a position corresponding to position 160; R at a position corresponding to position 163; F at a position corresponding to position 165; W at a position corresponding to position 174; L at a position corresponding to position 198; P at a position corresponding to position 204; A at a position corresponding to position 205; L at a position corresponding to position 205; T at a position corresponding to position 205; I at a position corresponding to position 206; R at a position corresponding to position 208; N at a position corresponding to position 213; E at a position corresponding to position 215; T at a position corresponding to position 215; Q at a position corresponding to position 240; L at a position corresponding to position 251; K at a position corresponding to position 259; M at a position corresponding to position 260; A at a position corresponding to position 261; F at a position corresponding to position 261; T at a position corresponding to position 263; Vat a position corresponding to position 271; A at a position corresponding to position 277; C at a position corresponding to position 277; A at a position corresponding to position 284; Q at a position corresponding to position 284; S at a position corresponding to position 284; V at a position corresponding to position 292; T at a position corresponding to position 315; A at a position corresponding to position 342; H at a position corresponding to position 369; H at a position corresponding to position 379; S at a position corresponding to position 379; T at a position corresponding to position 379; L at a position corresponding to position 380; P at a position corresponding to position 380; T at a position corresponding to position 380; H at a position corresponding to position 388; G at a position corresponding to position 412; P at a position corresponding to position 412; S at a position corresponding to position 412; T at a position corresponding to position 433; A at a position corresponding to position 438; T at a position corresponding to position 441; M at a position corresponding to position 443; Y at a position corresponding to position 445; C at a position corresponding to position 446; E at a position corresponding to position 447; and G at a position corresponding to position 447, with reference to positions in any of SEQ ID NOS: 3, 7 or 32-66.

[0439] In examples herein, exemplary amino acid replacements in the modified PH20 polypeptides provided herein include, but are not limited to, replacement with: glutamic acid (E) at a position corresponding to position 27; A at a position corresponding to position 132; K at a position corresponding to position 143; M at a position corresponding to position 147; C at a position corresponding to position 148; H at a position corresponding to position 148; Y at a position corresponding to position 160; P at a position corresponding to position 204; A at a position corresponding to position 205; I at a position corresponding to position 206; T at a position corresponding to position 215; M at a position corresponding to position 260; A at a position corresponding to position 261; F at a position corresponding to position 261; T at a position corresponding to position 263; A at a position corresponding to position 284; T at a position corresponding to position 315; and S at a position corresponding to position 379, with reference to positions in any of SEQ ID NOS: 3, 7 or 32-66.

[0440] In examples herein, a modified PH20 polypeptide contains an amino acid replacement that is one or more of replacement with: P at a position corresponding to position 30; R at a position corresponding to position 58; K at a position corresponding to position 60; K at a position corresponding to position 143; I at a position corresponding to position 147; P at a position corresponding to position 204; T at a position corresponding to position 215; T at a position corresponding to position 235; A at a position corresponding to position 261; G at a position corresponding to position 311; T at a position corresponding to position 315; and H at a position corresponding to position 369, with reference to positions in any of SEQ ID NOS: 3, 7 or 32-66.

[0441] In particular, in examples herein, a modified PH20 polypeptide contains an amino acid replacement that is one or more of replacement with: P at a position corresponding to position 204; A at a position corresponding to position 284; or T at a position corresponding to position 315, with reference to positions in any of SEQ ID NOS: 3, 7 or 32-66.

[0442] Provided herein are modified PH20 polypeptides set forth in any of SEQ ID NOS: 73-386, or a polypeptide that exhibits at least 85%, 86%, 87%, 88%, 89%, 90%, 91%, 92%, 93%, 94%, 95%, 96%, 97%, 98%, 99% or more sequence identity to any of SEQ ID NOS: 73-386.

[0443] 2. Nucleic Acid Molecules

[0444] Also provided herein are nucleic acid molecules that encode any of the modified PH20 polypeptides provided herein. For example, provided herein are nucleic acid molecules that encode any of the modified PH20 polypeptides set forth in any of SEQ ID NOS: 73-386, or that encodes a polypeptide that exhibits at least 85%, 86%, 87%, 88%, 89%, 90%, 91%, 92%, 93%, 94%, 95%, 96%, 97%, 98%, 99% or more sequence identity to any of SEQ ID NOS: 73-386.

[0445] In particular examples, the nucleic acid sequence can be codon optimized, for example, to increase expression levels of the encoded sequence. The particular codon usage is dependent on the host organism in which the modified polypeptide is expressed. One of skill in the art is familiar with optimal codons for expression in mammalian or human cells, bacteria or yeast, including for example E. coli or Saccharomyces cerevisiae. For example, codon usage information is available from the Codon Usage Database available at kazusa.or.jp.codon (see Richmond (2000) Genome Biology, 1:reports241 for a description of the database. See also, Forsburg (1994) Yeast, 10:1045-1047; Brown et al. (1991) Nucleic Acids Research, 19:4298; Sharp et al. (1988) Nucleic Acids Res., 12:8207-8211; Sharp et al. (1991) Yeast, 657-78). In some examples, the encoding nucleic acid molecules also can be modified to contain a heterologous signal sequence to alter (e.g., increased) expression and secretion of the polypeptide. Exemplary of a heterologous signal sequence is a nucleic acid encoding the IgG kappa signal sequence (set forth in SEQ ID NO:398).

[0446] The modified polypeptides and encoding nucleic acid molecules provided herein can be produced by standard recombinant DNA techniques known to one of skill in the art. Any method known in the art to effect mutation of any one or more amino acids in a target protein can be employed. Methods include standard site-directed or random mutagenesis of encoding nucleic acid molecules, or solid phase polypeptide synthesis methods. For example, nucleic acid molecules encoding a PH20 polypeptide can be subjected to mutagenesis, such as random mutagenesis of the encoding nucleic acid, error-prone PCR, site-directed mutagenesis, overlap PCR, gene shuffling, or other recombinant methods. The nucleic acid encoding the polypeptides can then be introduced into a host cell to be expressed heterologously. Hence, also provided herein are nucleic acid molecules encoding any of the modified polypeptides provided herein. In some examples, the modified PH20 polypeptides are produced synthetically, such as using solid phase or solutions phase peptide synthesis.

[0447] 3. Additional Modifications and Conjugates

[0448] The modified PH20 polypeptides include those that contain chemical or posttranslational modifications. In some examples, modified PH20 polypeptides provided herein do not contain chemical or posttranslational modifications. Chemical and post-translational modifications include, but are not limited to, PEGylation, sialation, albumination, glycosylation, farnysylation, carboxylation, hydroxylation, phosphorylation, and other polypeptide modifications known in the art.

[0449] Also, in addition to any one or more amino acid modifications, such as amino acid replacements, provided herein, modified PH20 polypeptides provided herein can be conjugated or fused to any moiety using any method known in the art, including chemical and recombinant methods, provided the resulting polypeptide retains hyaluronidase activity. For example, in addition to any one or more amino acid modifications, such as amino acid replacements, provided herein, modified PH20 polypeptides provided herein also can contain other modifications that are or are not in the primary sequence of the polypeptide, including, but not limited to, modification with a carbohydrate moiety, a polyethylene glycol (PEG) moiety, a sialic acid moiety, an Fc domain from immunoglobulin G, or any other domain or moiety. For example, such additional modifications can be made to increase the stability or serum half-life of the protein.

[0450] In some instances, the domain or other moiety is a targeted agent, including any agent that targets the conjugate to one or more cell types by selectively binding to a cell surface receptor or other cell surface moiety. For example, the domain or other moiety is a targeted agent that targets the conjugate to tumor cells. In such examples, a modified PH20 polypeptide, such as any provided herein, is linked directly or indirectly to a targeted agent. Such targeting agents include, but are not limited to, growth factors, cytokines, chemokines, antibodies, and hormones, or allelic variants, muteins, or fragments thereof so long as the targeting agent is internalized by a cell surface receptor. Exemplary, non-limiting, additional modifications are described below.

[0451] a. Decreased immunogenicity

[0452] The modified PH20 polypeptides provided herein can be made to have decreased immunogenicity. Decreased immunogenicity can be effected by sequence changes that elimiminate antigenic epitopes from the polypeptide or by altering post-translational modifications. One of skill in the art is familiar with methods of identifiying antigenic epitopes in a polypeptide (see e.g., Liang et al. (2009) BMC Bioinformatics, 10:302; Yang et al. (2009) Rev. Med. Virol., 19:77-96). In some examples, one or more amino acids can be modified in order to remove or alter an antigenic epitope.

[0453] In another example, altering the glycosylation of a protein also can effect immunogenicity. For example, altering the glycosylation of the peptide is contemplated, so long as the polypeptides minimally contain at least N-acetylglucosamine at amino acid residues corresponding to amino acid residues set forth as N200, N333 and N358 of SEQ ID NO:3 or 7.

[0454] For example, the PH20 polypeptides can be modified such that they lack fucose, particularly bifucosylation. In particular, the PH20 polypeptides provided herein are not bifucosylated. This can be achieved by expressing and producing the PH20 polypeptide in host cells that do not effect bifucosylation. Fucose is a deoxyhexose that is present in a wide variety of organisms, including mammals, insects and plants. Fucosylated glycans are synthesized by fucosyl-transferases; see, e.g., Ma et al., Glycobiology, 16(12):158R-184R, (2006); Nakayama et al., J. Biol. Chem., 276:16100-16106 (2001); and Sturla et al., Glycobiology, 15(10):924-935 (2005). In humans, fucose frequently exists as a terminal modification to glycan structures, and the presence of fucose α1,6-linked to N-acetylglucosamine has been shown to be important in glycoprotein processing and recognition. In insects, N-glycan core structures exhibit bifucosylation with α1,6- and α1,3-linkages. Insect cell core fucosylation with α1,3-linkages generates a carbohydrate epitope that is immunogenic in humans (see, e.g., US Publication No. 20070067855). For example, PH20 polypeptides provided herein can be generated in host cells that are incapable of bifucosylating the polypeptide. Thus, while insect cells or other cells that bifucosylate can be used for expression of the polypeptides, typically mammalian cells, such as CHO cells, are used.

[0455] In some examples, defucosylated, or fucose-deficient PH20 polypeptides can be generated in insect cells with modified glycosylation pathways, through the use of baculovirus expression vectors containing eukaryotic oligosaccharide processing genes, thereby creating “mammalianized” insect cell expression systems (see, e.g., U.S. Pat. No. 6,461,863). Alternatively, antigenicity can be eliminated by expression of PH20 polypeptides in insect cells lacking α1,3-fucosylatransferase (FT3) (see, e.g., US Publication No. 20070067855). In other examples, defucosylated or fucose-deficient PH20 polypeptides can be generated, for example, in cell lines that produce defucosylated proteins, including Lec13 CHO cells deficient in protein fucosylation (Ripka et al. Arch. Biochem. Biophys. 249:533-545 (1986); U.S. Pat. Pub. No. 2003/0157108; and WO 2004/056312), and knockout cell lines, such as alpha-1,6-fucosyltransferase gene, FUT8, knockout CHO cells (Yamane-Ohnuki et al. Biotech. Bioeng. 87: 614 (2004)).

[0456] B. Conjugation to Polymers

[0457] In some examples, the modified PH20 polypeptides provided herein are conjugated to polymers. Exemplary polymers that can be conjugated to the PH20 polypeptides, include natural and synthetic homopolymers, such as polyols (i.e., poly-OH), polyamines (i.e., poly-NH₂) and polycarboxylic acids (i.e., poly-COOH), and further heteropolymers, i.e., polymers containing one or more different coupling groups, e.g., hydroxyl groups and amine groups. Examples of suitable polymeric molecules include polymeric molecules selected from among polyalkylene oxides (PAO), such as polyalkylene glycols (PAG), including polyethylene glycols (PEG), methoxypolyethylene glycols (mPEG) and polypropylene glycols, PEG-glycidyl ethers (Epox-PEG), PEG-oxycarbonylimidazole (CDI-PEG), branched polyethylene glycols (PEGs), polyvinyl alcohol (PVA), polycarboxylates, polyvinylpyrrolidone, poly-D,L-amino acids, polyethylene-co-maleic acid anhydride, polystyrene-co-maleic acid anhydride, dextrans including carboxymethyl-dextrans, heparin, homologous albumin, celluloses, including methylcellulose, carboxymethylcellulose, ethylcellulose, hydroxyethylcellulose, carboxyethylcellulose and hydroxypropylcellulose, hydrolysates of chitosan, starches such as hydroxyethyl-starches and hydroxypropyl-starches, glycogen, agaroses and derivatives thereof, guar gum, pullulan, inulin, xanthan gum, carrageenan, pectin, alginic acid hydrolysates and bio-polymers.

[0458] Typically, the polymers are polyalkylene oxides (PAO), such as polyethylene oxides, such as PEG, typically mPEG, which have few reactive groups capable of cross-linking. Typically, the polymers are non-toxic polymeric molecules such as (methoxy)polyethylene glycol (mPEG) which can be covalently conjugated to the PH20 polypeptides (e.g., to attachment groups on the protein surface) using a relatively simple chemistry.

[0459] Suitable polymeric molecules for attachment to the PH20 polypeptides include, but are not limited to, polyethylene glycol (PEG) and PEG derivatives such as methoxy-polyethylene glycols (mPEG), PEG-glycidyl ethers (Epox-PEG), PEG-oxycarbonylimidazole (CDI-PEG), branched PEGs, and polyethylene oxide (PEO) (see e.g., Roberts et al., Advanced Drug Delivery Review 2002, 54:459-476; Harris and Zalipsky (eds.) “Poly(ethylene glycol), Chemistry and Biological Applications” ACS Symposium Series 680, 1997; Mehvar et al., J. Pharm. Pharmaceut. Sci., 3(1):125-136, 2000; Harris and Chess (2003) Nat Rev Drug Discov. 2(3):214-21; and Tsubery, J Biol. Chem 279(37):38118-24, 2004). The polymeric molecule can be of a molecular weight typically ranging from about 3 kDa to about 60 kDa. In some embodiments the polymeric molecule that is conjugated to a PH20 polypeptide provided herein has a molecular weight of 5, 10, 15, 20, 25, 30, 35, 40, 45, 50, 55, 60 or more than 60 kDa.

[0460] Various methods of modifying polypeptides by covalently attaching (conjugating) a PEG or PEG derivative (i.e., “PEGylation”) are known in the art (see e.g., U.S. 2006/0104968; U.S. Pat. No. 5,672,662; U.S. Pat. No. 6,737,505; and U.S. 2004/0235734). Techniques for PEGylation include, but are not limited to, specialized linkers and coupling chemistries (see e.g., Roberts, Adv. Drug Deliv. Rev. 54:459-476, 2002), attachment of multiple PEG moieties to a single conjugation site (such as via use of branched PEGs; see e.g., Guiotto et al., Bioorg. Med. Chem. Lett. 12:177-180, 2002), site-specific PEGylation and/or mono-PEGylation (see e.g., Chapman et al., Nature Biotech. 17:780-783, 1999), and site-directed enzymatic PEGylation (see e.g., Sato, Adv. Drug Deliv. Rev., 54:487-504, 2002) (see, also, for example, Lu and Felix (1994) Int. J. Peptide Protein Res. 43:127-138; Lu and Felix (1993) Peptide Res. 6:140-6, 1993; Felix et al. (1995) Int. J. Peptide Res. 46:253-64; Benhar et al. (1994) J. Biol. Chem. 269:13398-404; Brumeanu et al. (1995) J Immunol. 154:3088-95; see also, Caliceti et al. (2003) Adv. Drug Deliv. Rev. 55(10):1261-77 and Molineux (2003) Pharmacotherapy 23 (8 Pt 2):3S-8S). Methods and techniques described in the art can produce proteins having 1, 2, 3, 4, 5, 6, 7, 8, 9, 10 or more than 10 PEG or PEG derivatives attached to a single protein molecule (see e.g., U.S. 2006/0104968).

[0461] Numerous reagents for PEGylation have been described in the art. Such reagents include, but are not limited to, N-hydroxysuccinimidyl (NHS) activated PEG, succinimidyl mPEG, mPEG2-N-hydroxysuccinimide, mPEG succinimidyl alpha-methylbutanoate, mPEG succinimidyl propionate, mPEG succinimidyl butanoate, mPEG carboxymethyl 3-hydroxybutanoic acid succinimidyl ester, homobifunctional PEG-succinimidyl propionate, homobifunctional PEG propionaldehyde, homobifunctional PEG butyraldehyde, PEG maleimide, PEG hydrazide, p-nitrophenyl-carbonate PEG, mPEG-benzotriazole carbonate, propionaldehyde PEG, mPEG butryaldehyde, branched mPEG2 butyraldehyde, mPEG acetyl, mPEG piperidone, mPEG methylketone, mPEG “linkerless” maleimide, mPEG vinyl sulfone, mPEG thiol, mPEG orthopyridylthioester, mPEG orthopyridyl disulfide, Fmoc-PEG-NHS, Boc-PEG-NHS, vinylsulfone PEG-NHS, acrylate PEG-NHS, fluorescein PEG-NHS, and biotin PEG-NHS (see e.g., Monfardini et al., Bioconjugate Chem. 6:62-69, 1995; Veronese et al., J. Bioactive Compatible Polymers 12:197-207, 1997; U.S. Pat. No. 5,672,662; U.S. Pat. No. 5,932,462; U.S. Pat. No. 6,495,659; U.S. Pat. No. 6,737,505; U.S. Pat. No. 4,002,531; U.S. Pat. No. 4,179,337; U.S. Pat. No. 5,122,614; U.S. Pat. No. 5,324,844; U.S. Pat. No. 5,446,090; U.S. Pat. No. 5,612,460; U.S. Pat. No. 5,643,575; U.S. Pat. No. 5,766,581; U.S. Pat. No. 5,795,569; U.S. Pat. No. 5,808,096; U.S. Pat. No. 5,900,461; U.S. Pat. No. 5,919,455; U.S. Pat. No. 5,985,263; U.S. Pat. No. 5,990,237; U.S. Pat. No. 6,113,906; U.S. Pat. No. 6,214,966; U.S. Pat. No. 6,258,351; U.S. Pat. No. 6,340,742; U.S. Pat. No. 6,413,507; U.S. Pat. No. 6,420,339; U.S. Pat. No. 6,437,025; U.S. Pat. No. 6,448,369; U.S. Pat. No. 6,461,802; U.S. Pat. No. 6,828,401; U.S. Pat. No. 6,858,736; U.S. 2001/0021763; U.S. 2001/0044526; U.S. 2001/0046481; U.S. 2002/0052430; U.S. 2002/0072573; U.S. 2002/0156047; U.S. 2003/0114647; U.S. 2003/0143596; U.S. 2003/0158333; U.S. 2003/0220447; U.S. 2004/0013637; U.S. 2004/0235734; U.S. 2005/0114037; U.S. 2005/0171328; U.S. 2005/0209416; EP 1064951; EP 0822199; WO 01076640; WO 0002017; WO 0249673; WO 9428024; WO 0187925; and WO 2005000360).

### D. METHODS FOR IDENTIFYING THERMALLY STABLE HYALURONAN-DEGRADING ENZYMES

[0462] Provided herein are methods for identifying a modified or variant hyaluronan-degrading enzyme, such as a modified hyaluronidase or modified PH20 polypeptide, that exhibits thermal resistance compared to an unmodified hyaluronan-degrading enzyme, and is thermally stable. In the method, a modified hyaluronan-degrading enzyme or enzymes is/are tested or screened for hyaluronidase activity under a thermal stress condition (known to be destabilizing to a reference or unmodified hyalruonan-degrading enzyme) and are tested or screened for activity under a thermal neutral condition (known to be tolerated by a reference or unmodified hyaluronan-degrading enzyme).

[0463] In the method, one or more modified hyaluronan-degrading enzymes are provided. In some examples, a library of modified molecules is prepared. Methods of mutagenesis and generation of libraries or collections of variant molecules is described herein and is known to one of skill in the art using standard recombinant DNA techniques. In one example, the enzymes that are tested can be pooled and screened, whereby the method permits selection of only those enzymes that exhibit thermal resistance. In another example, the tested enzymes can be physically separated and screened individually, such as by formatting in arrays, such as addressable arrays.

[0464] Modified hyaluronan-degrading enzymes are identified that retain or exhibit at least 50% of the activity after incubation under the thermal stress condition compared to under the thermal neutral condition, such as generally at least 55%, 60%, 65%, 70%, 75%, 80%, 85%, 90%, 95% or more of the activity.

[0465] The method can be repeated a plurality of times. For example, the steps of the method can be repeated 1, 2, 3, 4, or 5 times. The method also can be performed iteratively, where an identified modified polypeptide is used as a reference polypeptide to generate a new collection of modified enzymes for screening. In one example, after the method is performed, any identified modified hyaluronan-degrading enzyme can be modified or further modified to increase or optimize the activity. By practice of the method, a thermally stable hyaluronan-degrading enzyme is identified.

[0466] A description of the steps of the method and components of the method are provided in the subsections that follow.

[0467] 1. Hyaluronan-Degrading Enzymes and Libraries of Modified Hyaluronan-Degrading Enzymes

[0468] In the methods, one or more modified hyaluronan-degrading enzymes, such as a hyaluronidase or a PH20 polypeptide, are tested or screened. The modified hyaluronan-degrading enzyme can be modified compared to an unmodified hyaluronan-degrading enzyme, such as any hyaluronan-degrading enzyme known in the art. Hyaluronan-degrading enzymes are a family of enzymes that degrade hyaluronic acid, which is an essential component of the extracellular matrix and a major constituent of the interstitial barrier. Hyaluronan-degrading enzymes act to degrade hyaluronan by cleaving hyaluronan polymers, which are composed of repeating disaccharides units: D-glucuronic acid (GlcA) and N-acetyl-D-glucosamine (GlcNAc), linked together via alternating β-1→4 and β-1→3 glycosidic bonds. By catalyzing the hydrolysis of hyaluronic acid, a major constituent of the interstitial barrier, hyaluronan-degrading enzymes lower the viscosity of hyaluronic acid, thereby increasing tissue permeability. Accordingly, hyaluronan-degrading enzymes for modification in the methods provided herein include any enzyme having the ability to catalyze the cleavage of a hyaluronan disaccharide chain or polymer. In some examples, the hyaluronan-degrading enzyme cleaves the β-1→4 glycosidic bond in the hyaluronan chain or polymer. In other examples, the hyaluronan-degrading enzyme catalyzes the cleavage of the β-1→3 glycosidic bond in the hyaluronan chain or polymer.

[0469] Hyaluronan-degrading enzymes include enzymes that are membrane-bound or that are soluble forms that are secreted from cells. Thus, where hyaluronan-degrading enzymes include a glycosylphosphatidylinositol (GPI) anchor signal sequence and/or are otherwise membrane-anchored or insoluble, such hyaluronan-degrading enzymes can be provided in soluble form by C-terminal truncation or deletion of all or a portion of the GPI anchor signal sequence to render the enzyme secreted and soluble. Thus, hyaluronan-degrading enzymes include C-terminally truncated variants, e.g., truncated to remove all or a portion of a GPI anchor signal sequence. Examples of such soluble hyaluronidases are soluble PH20 hyaluronides, such as any set forth in U.S. Pat. No. 7,767,429; U.S. Publication Nos. US 2004/0268425 and US 2010/0143457.

[0470] Exemplary hyaluronan-degrading enzymes are non-human animal or human hyaluronidases, bacterial hyaluronidases, hyaluronidases from leeches or chondroitinases that exhibit hyaluronan-degrading activity, including soluble or truncated forms thereof that are active. Exemplary non-human animal hyaluronidases are any set forth in any of SEQ ID NOS: 8-31, 387-392, 399, 400, 401-416, or mature, C-terminally truncated variants that are soluble and active, or active forms thereof. Exemplary human hyaluronidases are any set forth in any of SEQ ID NOS: 2, 3, 6, 7, 32-66, 68-72 or 417-420, or mature, C-terminally truncated variants that are soluble and active, or active forms thereof, and in particular any of SEQ ID NOS: 3, 7, 32-66, 69 or 72. Exemplary bacterial hyaluronidases are any set forth in any of SEQ ID NOS: 421-451 or mature, C-terminally truncated variants that are soluble and active, or active forms thereof. Exemplary chondroitinases that have hyaluronan-degrading enzyme activity are set forth in SEQ ID NOS:452-454, or mature, C-terminally truncated variants that are soluble and active, or active forms thereof.

[0471] Any of such hyaluronan-degrading enzymes can be modified and screened in the methods herein to identify a modified hyaluronan-degrading enzyme that exhibits stability under thermal stress conditions. For example, the modified PH20 polypeptide can be modified compared to an unmodified PH20 polypeptide, such as any known PH20 polypeptide native, wildtype or reference polypeptide. For example, the modified PH20 polypeptide is modified compared to a full-length, soluble or active form of a PH20 polypeptide, such as any set forth in any of SEQ ID NOS: 3, 7, 32-66, 69 or 72, or a polypeptide that exhibits at least 85%, such as at least 86%, 87%, 88%, 89%, 90%, 91%, 92%, 93%, 94%, 95%, 96%, 97%, 98%, 99% or more sequence identity to any of SEQ ID NOS: 3, 7, 32-66, 69 or 72. In particular examples of the method herein, the starting or unmodified PH20 polypeptide has the sequence of amino acids set forth in SEQ ID NO:3.

[0472] Libraries or collections of modified hyaluronan-degrading enzymes can be screened. Hyaluronan-degrading enzymes can be modified by any process known to one of skill in the art that can alter the structure of a protein. Examples of modifications include replacement, addition, and deletion of one or more amino acids of the protein to form libraries or collections of modified hyaluronan-degrading enzymes. It is within the level of one of skill in the art to generate modified or variant proteins for use in the methods herein. Methods of mutagenesis are well known in the art and include, for example, site-directed mutagenesis such as for example QuikChange (Stratagene) or saturation mutagenesis. Mutagenesis methods include, but are not limited to, site-mediated mutagenesis, PCR mutagenesis, cassette mutagenesis, site-directed mutagenesis, random point mutagenesis, mutagenesis using uracil containing templates, oligonucleotide-directed mutagenesis, phosphorothioate-modified DNA mutagenesis, mutagenesis using gapped duplex DNA, point mismatch repair, mutagenesis using repair-deficient host strains, restriction-selection and restriction-purification, deletion mutagenesis, mutagenesis by total gene synthesis, double-strand break repair, and many others known to persons of skill. In the methods herein, mutagenesis can be effected across the full length of a protein or within a region of a protein. The mutations can be made rationally or randomly.

[0473] In some examples, the methods provided herein are performed such that the identity of each mutant protein is known a priori before the protein is tested. For example, the methods provided herein can be conducive to mutagenesis and screening or testing methods that are addressable. This can permit the ease of comparisons between the activities of tested proteins without the need for sequencing of identified proteins. For example, site-directed mutagenesis methods can be used to individually generate mutant proteins. Mutagenesis can be performed by the replacement of single amino acid residues at specific target positions one-by-one, such that each individual mutant generated is the single product of each single mutagenesis reaction. Mutant DNA molecules can be designed, generated by mutagenesis and cloned individually, such as in addressable arrays, such that they are physically separated from each other and each one is the single product of an independent mutagenesis reaction. The amino acids selected to replace the target positions on the particular protein being optimized can be either all of the remaining 19 amino acids, or a more restricted group containing only selected amino acids. In some methods provided herein, each amino acid that is replaced is independently replaced by 19 of the remaining amino acids or by less than 19 of the remaining amino acids, such as 10, 11, 12, 13, 14, 15, 16, 17 or 18 of the remaining amino acids.

[0474] 2. Screening or Testing for Activity Under Thermal Stress Conditions

[0475] In the method, a modified hyaluronan-degrading enzyme or enzymes is/are tested or screened for hyaluronidase activity under a thermal stress condition. The thermal stress condition need not be a condition or agent that is completely deadly to the enzyme, but generally is a thermal condition that destabilizes enzyme activity over time. The thermal stress condition is one that is chosen because it effects instability or denaturation of the unmodified hyaluronan-degrading enzyme not containing the modification(s). For example, a thermal stress condition is a temperature and incubation time at which the starting or reference hyaluronan-degrading enzyme (i e unmodified hyaluronan-degrading enzyme) loses 50% or more of its activity, 50% or more of its solubility or 50% or more of its secondary or tertiary structure, such as 60%, 70%, 80%, 90%, or more of an activity or property. Such a condition can be empirically determined by a skilled artisan for any starting or reference hyaluronan-degrading enzyme (i e unmodified hyaluronan-degrading enzyme), for example, based on a T₅₀ as determined in a thermal challenge assay or based on the melting temperature (Tm) of the enzyme. For example, the thermal stress condition is a temperature and incubation time at which the starting or reference hyaluronan-degrading enzyme (i e unmodified hyaluronan-degrading enzyme) loses more than 60%, 70%, 80%, 90% or more of its activity, solubility or secondary or tertiary structure.

[0476] For example, a thermal challenge assay can be used to assess activity of a hyaluronan-degrading enzyme (i e unmodified hyaluronan-degrading enzyme) across a range of temperatures over a defined time period in order to determine the thermal stress condition. It is understood that the thermal stress condition is a function of time, and that the temperature causing thermal stress is inversely proportional to time. For example, the higher the temperature, the shorter the amount of time that thermal instability is achieved, and the lower the temperature, the longer the amount of time that thermal instability is achieved. The time period chosen can be user selected. The temperature at which 50% of the hyaluronidase activity is retained can be determined and is the T₅₀ or Tc value for the time period, which is an indicator of the stability of the particular protein when incubated at the temperature for the time period. In order to identify variant polypeptides with increased thermal stability or resistance, the T₅₀ value of the unmodified hyaluronan-degrading enzyme can be used as the reference point of thermal stability, whereby modified hyaluronan-degrading enzymes are incubated for the time period at temperatures that are equal to or greater than the T₅₀ value for the time.

[0477] In another example, the thermal stress condition can be based on the melting temperature (Tm) of a reference hyaluronan-degrading enzyme (i.e. unmodified hyaluronan-degrading enzyme) using any method that can extrapolate or assess the folded state of the molecule. For example, analytical spectroscopy techniques, such as dynamic light scattering methods, can be used. The temperature at which 50% of molecules are in a folded state can be determined and is the Tm of the particular enzyme, which is an indicator of the stability of the particular protein. In order to identify variant polypeptides with increased thermal stability or resistance, the Tm value of the unmodified hyaluronan-degrading enzyme can be used as the reference point of thermal stability, whereby modified hyaluronan-degrading enzymes are incubated for a predetermined time at temperatures that are equal to or greater than the Tm value for the time.

[0478] Thus, in aspects of the method herein, modified hyaluronan-degrading enzyme or enzymes is/are tested or screened for hyaluronidase activity under a thermal stress condition by incubation at a temperature that is equal to or is greater than the T₅₀ or the Tm of the corresponding reference hyaluronan-degrading enzyme (i.e. unmodified hyaluronan-degrading enzyme) for a predetermined time. For example, the modified hyaluronan-degrading enzyme or enzymes is/are tested or screened for hyaluronidase activity under a thermal stress condition that is a temperature that is greater than 1° C., 2° C., 3° C., 4° C., 5° C., 6° C., 7° C., 8° C., 9° C., 10° C., 20° C., 21° C., 22° C., 24° C., 25° C. or more than the T₅₀ or the Tm of the corresponding reference hyaluronan-degrading enzyme (i e unmodified hyaluronan-degrading enzyme) for a predetermined time. The predetermined time can be any time as selected by the end user of the method as described herein below. For example, as shown in the Examples herein, for the exemplary PH20 hyaluronidase designated rHuPH20, which is a soluble C-terminally truncated fragment of human PH20, the Tm is about 44° C. The T₅₀ for 10 minutes is about or less than 49° C. to 52° C.

[0479] For example, in practice of the method herein, the thermal stress condition can be one in which the modified hyaluronan-degrading enzyme is incubated at a temperature that is greater than 45° C., and generally greater than 50° C., such as greater than 51° C., 52° C., 53° C., 54° C., 55° C., 56° C., 57° C., 58° C., 59° C., 60° C., 61° C., 62° C., 63° C., 64° C., 65° C. or higher.

[0480] The predetermined time of incubation can be user selected. The incubation or exposure can be for any desired length of time, and can be empirically determined by one of skill in the art. As an example, where a T₅₀ value based on a thermal challenge assay of a reference or modified hyaluronan-degrading enzyme is used as the baseline of thermal stability to improve thermal stability, the time period correlating to the T₅₀ value is used (i.e. the time period at which the thermal challenge was performed). For example, the modified hyaluronan-degrading enzyme can be incubated at a desired temperature for or about for 1 minute to 1 month, such as 1 minute to 3 weeks, 1 minute to 2 weeks, 1 minute to 1 week, 1 minute to 24 hours, 1 minute to 12 hours, such as 5 minutes to 30 minutes, 5 minutes to 15 minutes, 30 minutes to 6 hours or 1 hour to 4 hours, and generally at least or about at least 30 minutes, 1 hour, 2 hours, 3 hours, 4 hours, 5 hours, 6 hours, 7 hours, 8 hours, 9 hours, 10 hours, 11 hours or 12 hours. For purposes of performing a high-throughput assay or otherwise rapidly screening candidates, the predetermined time is selected that is less than 2 hours, and generally less than 1 hour, 30 minutes, 20 minutes, 10 minutes of less. For example, screening is performed after incubation at the temperature for 10 minutes. After the incubation for the predetermined time, the sample is returned to a thermal neutral condition in order to remove the polypeptide from further destabilizing conditions.

[0481] In the methods, the modified hyaluronan degrading enzyme also is tested or screened for hyaluronidase activity under a thermal neutral condition at which the starting or reference hyaluronan-degrading enzyme (i e unmodified hyaluronan-degrading enzyme) retains or maintains activity. For example, the modified hyaluronan-degrading enzyme is incubated at a temperature of 2° C. to 8° C., such as 4° C., for the predetermined time and then hyaluronidase activity determined. For comparison, the predetermined time is the same as tested in the thermal stress condition.

[0482] Hence, each member of a library or collection of modified hyaluronan-degrading enzymes is incubated under or exposed to a thermal stress condition, such as any described above. The same modified enzyme also is incubated or exposed to a thermal neutral condition, such as any described above. The incubation or exposure can occur in vivo or in vitro. Typically, the assay is performed in vitro. The activities under both conditions are compared in order to identify a modified hyaluronan-degrading enzymes that exhibit stability upon exposure to the thermal stress condition. Further, in screening or identifying the activity of the enzyme under the two different sets of conditions, generally the only conditions that are varied in the assay relate to the temperature. The other conditions of the assay, including but not limited to, time and/or other incubation conditions, can be the same for both sets of conditions. In any examples where a modified hyaluronan-degrading enzyme is assessed, it is understood that an unmodified hyaluronan-degrading enzyme not containing the modifications(s) also can be assessed under similar assay conditions for comparison.

[0483] For example, in aspects of the method herein, a modified hyaluronan-degrading enzyme or enzymes is/are tested or screened for hyaluronidase activity after incubation at 52° C. for 10 minutes, and also tested or screened for hyaluronidase activity after incubation at 4° C. for 10 minutes. Each hyaluronan-degrading enzyme can be a member of a collection of modified hyaluronan-degrading enzymes. Each hyaluronan-degrading enzyme can be tested separately under each condition from the other hyaluronan-degrading enzymes (e.g. modified hyaluronan-degrading enzymes, such as modified PH20 polypeptides) in the collection.

[0484] After the time of incubation or exposure, the sample or composition containing the modified hyaluronan-degrading enzyme (or control unmodified enzyme) is assessed for hyaluronidase assay. Assays to assess hyaluronidase activity are well known in the art. Examples of such assays are described in Section G. In one example, hyaluronidase activity can be assessed in a microturbidity assay, wherein the amount of undegraded HA is measured by the addition of a reagent that precipitates HA (e.g., Cetylpyridinium chloride (CPC) or acidified serum) after the enzyme is allowed to react with HA. In another example, hyaluronidase activity can be assessed using a microtiter assay in which residual biotinylated hyaluronic acid is measured following incubation with hyaluronidase (see e.g., Frost and Stern (1997) Anal. Biochem. 251:263-269, U.S. Pat. Publication No. 20050260186). The resulting activities under each of the tested conditions is determined and compared.

[0485] 3. Selection or Identification

[0486] After testing, the hyaluronidase activity is assessed in order to identify modified hyaluronan-degrading enzymes that, after incubation at the thermal stress condition (e.g. incubation at 52° C. for 10 minutes), exhibit greater than or at least 50% of the activity achieved after incubation at the thermal neutral condition (e.g. incubation 4° C. for 10 minutes). The desired level or amount of activity selected as a cut-off in the methods can be empirically determined by the user, and is dependent on factors such as the particular hyaluronan-degrading enzyme, the desired application or use of the hyaluronan-degrading enzyme, the particular temperature condition and other similar factors. Typically, a modified hyaluronan-degrading enzyme is identified that exhibits at least 55%, 60%, 65%, 70%, 75%, 80%, 85%, 90%, 95% or more of the activity after incubation under a thermal stress condition compared to after incubation under a thermal neutral condition.

[0487] Additionally or alternatively, the activity of the modified hyaluronan-degrading enzyme exposed to a thermal stress condition is compared to the activity of the corresponding unmodified hyaluronan-degrading enzyme that is exposed to the same thermal stress condition. In such examples, it is understood that the activity of the modified and unmodified enzyme are tested under the same conditions (e.g., time, temperature, composition), except for the difference in the particular enzyme tested (unmodified versus modified). A modified hyaluronan-degrading enzyme is identified that exhibits greater activity, such as at least 110%, 120%, 130%, 140%, 150%, 160%, 170%, 180%, 190%, 200%, 250%, 300%, 400%, 500% or more of the activity of the unmodified hyaluronan-degrading enzyme.

[0488] 4. Iterative Methods

[0489] The method provided herein also is iterative. In one example, after the method is performed, any modified hyaluronan-degrading enzymes identified as exhibiting thermal stability, such as increased thermal resistance, is modified or further modified to increase or optimize the stability. A secondary library can be created by introducing additional modifications in a first identified modified hyaluronan-degrading enzyme. For example, modifications that were identified as conferring stability, such as increasing stability, can be combined to generate a combinatorial library. The secondary library can be tested using the assays and methods described herein.

[0490] In another example of an iterative aspect of the method, modified hyaluronan-degrading enzymes that are identified as not exhibiting stability such as increased stability (e.g., such that they are not active or do not have increased activity under the a thermal stress condition), can be further modified and retested for stability under a thermal stress condition. The further modifications can be targeted near particular regions (e.g., particular amino acid residues) associated with activity and/or stability of the molecule. For example, residues that are associated with activity and/or stability of the molecule generally are critical residues that are involved in the structural folding or other activities of the molecule. Hence, such residues are required for activity, generally under any condition. Critical residues can be identified because, when mutated, a normal activity of the protein is ablated or reduced. For example, critical residues can be identified that, when mutated in a hyaluronan-degrading enzyme, exhibit reduced or ablated hyaluronidase activity under a normal or control assay condition. A further library of modified proteins can be generated with amino acid mutations targeted at or near to the identified critical amino acid residues, such as adjacent to the identified critical amino acid residues. In some examples, the mutations can be amino acid replacement to any other of up to 19 other amino acid residues. The secondary library can be tested using the assays and methods described herein.

### E. PRODUCTION OF MODIFIED PH20 POLYPEPTIDES AND ENCODING NUCLEIC ACID MOLECULES

[0491] Polypeptides of a modified PH20 polypeptide set forth herein can be obtained by methods well known in the art for protein purification and recombinant protein expression. Polypeptides also can be synthesized chemically. Modified or variant, including truncated, forms can be engineered from a wildtype polypeptide using standard recombinant DNA methods. For example, modified PH20 polypeptides can be engineered from a wildtype polypeptide, such as by site-directed mutagenesis.

[0492] 1. Isolation or Preparation of Nucleic Acids Encoding PH20 Polypeptides

[0493] Polypeptides can be cloned or isolated using any available methods known in the art for cloning and isolating nucleic acid molecules. Such methods include PCR amplification of nucleic acids and screening of libraries, including nucleic acid hybridization screening, antibody-based screening and activity-based screening.

For example, when the polypeptides are produced by recombinant means, any method known to those of skill in the art for identification of nucleic acids that encode desired genes can be used. Any method available in the art can be used to obtain a full length or partial (i.e., encompassing the entire coding region) cDNA or genomic DNA clone encoding a PH20, such as from a cell or tissue source.

[0494] Methods for amplification of nucleic acids can be used to isolate nucleic acid molecules encoding a desired polypeptide, including for example, polymerase chain reaction (PCR) methods. Examples of such methods include use of a Perkin-Elmer Cetus thermal cycler and Taq polymerase (Gene Amp). A nucleic acid containing material can be used as a starting material from which a desired polypeptide-encoding nucleic acid molecule can be isolated. For example, DNA and mRNA preparations, cell extracts, tissue extracts, fluid samples (e.g., blood, serum, saliva), samples from healthy and/or diseased subjects can be used in amplification methods. The source can be from any eukaryotic species including, but not limited to, vertebrate, mammalian, human, porcine, bovine, feline, avian, equine, canine, and other primate sources. Nucleic acid libraries also can be used as a source of starting material. Primers can be designed to amplify a desired polypeptide. For example, primers can be designed based on expressed sequences from which a desired polypeptide is generated. Primers can be designed based on back-translation of a polypeptide amino acid sequence. If desired, degenerate primers can be used for amplification. Oligonucleotide primers that hybridize to sequences at the 3′ and 5′ termini of the desired sequence can be uses as primers to amplify by PCR sequences from a nucleic acid sample. Primers can be used to amplify the entire full-length PH20, or a truncated sequence thereof, such as a nucleic acid encoding any of the soluble PH20 polypeptides provided herein. Nucleic acid molecules generated by amplification can be sequenced and confirmed to encode a desired polypeptide.

[0495] Additional nucleotide sequences can be joined to a polypeptide-encoding nucleic acid molecule, including linker sequences containing restriction endonuclease sites for the purpose of cloning the synthetic gene into a vector, for example, a protein expression vector or a vector designed for the amplification of the core protein coding DNA sequences. Furthermore, additional nucleotide sequences specifying functional DNA elements can be operatively linked to a polypeptide-encoding nucleic acid molecule. Examples of such sequences include, but are not limited to, promoter sequences designed to facilitate intracellular protein expression, and secretion sequences, for example heterologous signal sequences, designed to facilitate protein secretion. Such sequences are known to those of skill in the art. For example, exemplary heterologous signal sequences include, but are not limited to, human and mouse kappa IgG heterologous signal sequences set forth in SEQ ID NO: 398. Additional nucleotide residue sequences such as sequences of bases specifying protein binding regions also can be linked to enzyme-encoding nucleic acid molecules. Such regions include, but are not limited to, sequences of residues that facilitate or encode proteins that facilitate uptake of an enzyme into specific target cells, or otherwise alter pharmacokinetics of a product of a synthetic gene.

[0496] In addition, tags or other moieties can be added, for example, to aid in detection or affinity purification of the polypeptide. For example, additional nucleotide residue sequences such as sequences of bases specifying an epitope tag or other detectable marker also can be linked to enzyme-encoding nucleic acid molecules. Examples of such sequences include nucleic acid sequences encoding a His tag or Flag Tag.

[0497] The identified and isolated nucleic acids can then be inserted into an appropriate cloning vector. A large number of vector-host systems known in the art can be used. Possible vectors include, but are not limited to, plasmids or modified viruses, but the vector system must be compatible with the host cell used. Such vectors include, but are not limited to, bacteriophages such as lambda derivatives, or plasmids such as pCMV4, pBR322 or pUC plasmid derivatives or the Bluescript vector (Stratagene, La Jolla, Calif.). Other expression vectors include the HZ24 expression vector exemplified herein (see e.g., SEQ ID NOS:4 and 5). The insertion into a cloning vector can, for example, be accomplished by ligating the DNA fragment into a cloning vector which has complementary cohesive termini. Insertion can be effected using TOPO cloning vectors (Invitrogen, Carlsbad, Calif.).

[0498] If the complementary restriction sites used to fragment the DNA are not present in the cloning vector, the ends of the DNA molecules can be enzymatically modified. Alternatively, any site desired can be produced by ligating nucleotide sequences (linkers) onto the DNA termini; these ligated linkers can contain specific chemically synthesized oligonucleotides encoding restriction endonuclease recognition sequences. In an alternative method, the cleaved vector and protein gene can be modified by homopolymeric tailing.

[0499] Recombinant molecules can be introduced into host cells via, for example, transformation, transfection, infection, electroporation and sonoporation, so that many copies of the gene sequence are generated. In specific embodiments, transformation of host cells with recombinant DNA molecules that incorporate the isolated protein gene, cDNA, or synthesized DNA sequence enables generation of multiple copies of the gene. Thus, the gene can be obtained in large quantities by growing transformants, isolating the recombinant DNA molecules from the transformants and, when necessary, retrieving the inserted gene from the isolated recombinant DNA.

[0500] In addition to recombinant production, modified PH20 polypeptides provided herein can be produced by direct peptide synthesis using solid-phase techniques (see e.g., Stewart et al. (1969) Solid-Phase Peptide Synthesis, WH Freeman Co., San Francisco; Merrifield J (1963) J Am Chem Soc., 85:2149-2154). In vitro protein synthesis can be performed using manual techniques or by automation. Automated synthesis can be achieved, for example, using Applied Biosystems 431A Peptide Synthesizer (Perkin Elmer, Foster City Calif.) in accordance with the instructions provided by the manufacturer. Various fragments of a polypeptide can be chemically synthesized separately and combined using chemical methods.

[0501] 2. Generation of Mutant or Modified Nucleic Acid and Encoding Polypeptides

[0502] The modifications provided herein can be made by standard recombinant DNA techniques such as are routine to one of skill in the art. Any method known in the art to effect mutation of any one or more amino acids in a target protein can be employed. Methods include standard site-directed mutagenesis (using e.g., a kit, such as QuikChange available from Stratagene) of encoding nucleic acid molecules, or by solid phase polypeptide synthesis methods.

[0503] 3. Vectors and Cells

[0504] For recombinant expression of one or more of the desired proteins, such as any modified PH20 polypeptide described herein, the nucleic acid containing all or a portion of the nucleotide sequence encoding the protein can be inserted into an appropriate expression vector, i.e., a vector that contains the necessary elements for the transcription and translation of the inserted protein coding sequence. The necessary transcriptional and translational signals also can be supplied by the native promoter for enzyme genes, and/or their flanking regions.

[0505] Also provided are vectors that contain a nucleic acid encoding the enzyme. Cells containing the vectors also are provided. The cells include eukaryotic and prokaryotic cells, and the vectors are any suitable for use therein. Generally, the cell is a cell that is capable of effecting glyosylation of the encoded protein.

[0506] Prokaryotic and eukaryotic cells containing the vectors are provided. Such cells include bacterial cells, yeast cells, fungal cells, Archea, plant cells, insect cells and animal cells. The cells are used to produce a protein thereof by growing the above-described cells under conditions whereby the encoded protein is expressed by the cell, and recovering the expressed protein. For purposes herein, for example, the enzyme can be secreted into the medium.

[0507] A host cell strain can be chosen for its ability to modulate the expression of the inserted sequences or to process the expressed protein in the desired fashion. Such modifications of the polypeptide include, but are not limited to, acetylation, carboxylation, glycosylation, phosphorylation, lipidation and acylation. Post-translational processing can impact the folding and/or function of the polypeptide. Different host cells, such as, but not limited to, CHO (DG44, DXB11, CHO-K1), HeLa, MCDK, 293 and WI38 have specific cellular machinery and characteristic mechanisms for such post-translational activities and can be chosen to ensure the correct modification and processing of the introduced protein. Generally, the choice of cell is one that is capable of introducing N-linked glycosylation into the expressed polypeptide. Hence, eukaryotic cells containing the vectors are provided. Exemplary eukaryotic cells are mammalian Chinese Hamster Ovary (CHO) cells. For example, CHO cells deficient in dihydrofolate reductase (e.g., DG44 cells) are used to produce polypeptides provided herein. Note that bacterial expression of an PH20 polypeptide provided herein will not result in a catalytically active polypeptide, but when combined with proper glycosylation machinery, the PH20 can be artificially glycosylated.

[0508] Provided are vectors that contain a sequence of nucleotides that encodes the modified PH20 polypeptide, coupled to the native or heterologous signal sequence, as well as multiple copies thereof. The vectors can be selected for expression of the enzyme protein in the cell or such that the enzyme protein is expressed as a secreted protein.

[0509] A variety of host-vector systems can be used to express the protein encoding sequence. These include but are not limited to mammalian cell systems infected with virus (e.g., vaccinia virus, adenovirus and other viruses); insect cell systems infected with virus (e.g., baculovirus); microorganisms such as yeast containing yeast vectors; or bacteria transformed with bacteriophage, DNA, plasmid DNA, or cosmid DNA. The expression elements of vectors vary in their strengths and specificities. Depending on the host-vector system used, any one of a number of suitable transcription and translation elements can be used.

[0510] Any methods known to those of skill in the art for the insertion of DNA fragments into a vector can be used to construct expression vectors containing a chimeric gene containing appropriate transcriptional/translational control signals and protein coding sequences. These methods can include in vitro recombinant DNA and synthetic techniques and in vivo recombinants (genetic recombination). Expression of nucleic acid sequences encoding protein, or domains, derivatives, fragments or homologs thereof, can be regulated by a second nucleic acid sequence so that the genes or fragments thereof are expressed in a host transformed with the recombinant DNA molecule(s). For example, expression of the proteins can be controlled by any promoter/enhancer known in the art. In a specific embodiment, the promoter is not native to the genes for a desired protein. Promoters which can be used include, but are not limited to, the SV40 early promoter (Bernoist and Chambon, Nature 290:304-310 (1981)), the promoter contained in the 3′ long terminal repeat of Rous sarcoma virus (Yamamoto et al. Cell 22:787-797 (1980)), the herpes thymidine kinase promoter (Wagner et al., Proc. Natl. Acad. Sci. USA 78:1441-1445 (1981)), the regulatory sequences of the metallothionein gene (Brinster et al., Nature 296:39-42 (1982)); prokaryotic expression vector promoters, such as the β-lactamase promoter (Jay et al., (1981) Proc. Natl. Acad. Sci. USA 78:5543) or the tac promoter (DeBoer et al., Proc. Natl. Acad. Sci. USA 80:21-25 (1983); see also Gilbert and Villa-Komaroff, “Useful Proteins from Recombinant Bacteria,” Scientific American 242:74-94 (1980)); plant expression vector promoters, such as the nopaline synthetase promoter (Herrera-Estrella et al., Nature 303:209-213 (1983)) or the cauliflower mosaic virus 35S RNA promoter (Gardner et al., Nucleic Acids Res. 9:2871 (1981)), and the promoter of the photosynthetic enzyme ribulose bisphosphate carboxylase (Herrera-Estrella et al., Nature 310:115-120 (1984)); promoter elements from yeast and other fungi such as the Gal4 promoter, the alcohol dehydrogenase promoter, the phosphoglycerol kinase promoter, the alkaline phosphatase promoter, and the following animal transcriptional control regions that exhibit tissue specificity and have been used in transgenic animals: elastase I gene control region which is active in pancreatic acinar cells (Swift et al., Cell 38:639-646 (1984); Ornitz et al., Cold Spring Harbor Symp. Quant. Biol. 50:399-409 (1986); MacDonald, Hepatology 7:425-515 (1987)); insulin gene control region which is active in pancreatic beta cells (Hanahan et al., Nature 315:115-122 (1985)), immunoglobulin gene control region which is active in lymphoid cells (Grosschedl et al., Cell 38:647-658 (1984); Adams et al., Nature 318:533-538 (1985); Alexander et al., Mol. Cell Biol. 7:1436-1444 (1987)), mouse mammary tumor virus control region which is active in testicular, breast, lymphoid and mast cells (Leder et al., Cell 45:485-495 (1986)), albumin gene control region which is active in liver (Pinkert et al., Genes and Devel. 1:268-276 (1987)), alpha-fetoprotein gene control region which is active in liver (Krumlauf et al., Mol. Cell. Biol. 5:1639-1648 (1985); Hammer et al., Science 235:53-58 1987)), alpha-1 antitrypsin gene control region which is active in liver (Kelsey et al., Genes and Devel. 1:161-171 (1987)), beta globin gene control region which is active in myeloid cells (Magram et al., Nature 315:338-340 (1985); Kollias et al., Cell 46:89-94 (1986)), myelin basic protein gene control region which is active in oligodendrocyte cells of the brain (Readhead et al., Cell 48:703-712 (1987)), myosin light chain-2 gene control region which is active in skeletal muscle (Shani, Nature 314:283-286 (1985)), and gonadotrophic releasing hormone gene control region which is active in gonadotrophs of the hypothalamus (Mason et al., Science 234:1372-1378 (1986)).

[0511] In a specific embodiment, a vector is used that contains a promoter operably linked to nucleic acids encoding a desired protein, or a domain, fragment, derivative or homolog thereof, one or more origins of replication, and optionally, one or more selectable markers (e.g., an antibiotic resistance gene). Depending on the expression system, specific initiation signals also are required for efficient translation of a PH20 sequence. These signals include the ATG initiation codon and adjacent sequences. In cases where the initiation codon and upstream sequences of PH20 or soluble forms thereof are inserted into the appropriate expression vector, no additional translational control signals are needed. In cases where only a coding sequence, or a portion thereof, is inserted, exogenous transcriptional control signals including the ATG initiation codon must be provided. Furthermore, the initiation codon must be in the correct reading frame to ensure transcription of the entire insert. Exogenous transcriptional elements and initiation codons can be of various origins, both natural and synthetic. The efficiency of expression can be enhanced by the inclusion of enhancers appropriate to the cell system in use (Scharf et al. (1994) Results Probl Cell Differ 20:125-62; Bittner et al. (1987) Methods in Enzymol, 153:516-544).

[0512] Exemplary plasmid vectors for transformation of E. coli cells include, for example, the pQE expression vectors (available from Qiagen, Valencia, Calif.; see also literature published by Qiagen describing the system). pQE vectors have a phage T5 promoter (recognized by E. coli RNA polymerase) and a double lac operator repression module to provide tightly regulated, high-level expression of recombinant proteins in E. coli, a synthetic ribosomal binding site (RBS II) for efficient translation, a 6×His tag coding sequence, t₀ and T1 transcriptional terminators, ColE1 origin of replication, and a beta-lactamase gene for conferring ampicillin resistance. The pQE vectors enable placement of a 6×His tag at either the N- or C-terminus of the recombinant protein. Such plasmids include pQE 32, pQE 30, and pQE 31 which provide multiple cloning sites for all three reading frames and provide for the expression of N-terminally 6×His-tagged proteins. Other exemplary plasmid vectors for transformation of E. coli cells, include, for example, the pET expression vectors (see, U.S. Pat. No. 4,952,496; available from Novagen, Madison, Wis.; see, also literature published by Novagen describing the system). Such plasmids include pET 11a, which contains the T7lac promoter, T7 terminator, the inducible E. coli lac operator, and the lac repressor gene; pET 12a-c, which contains the T7 promoter, T7 terminator, and the E. coli ompT secretion signal; and pET 15b and pET19b (Novagen, Madison, Wis.), which contain a His-Tag™ leader sequence for use in purification with a His column and a thrombin cleavage site that permits cleavage following purification over the column, the T7-lac promoter region and the T7 terminator.

[0513] Typically, vectors can be plasmids, viral vectors, or others known in the art, used for expression of the modified PH20 polypeptide in vivo or in vitro. For example, the modified PH20 polypeptide is expressed in mammalian cells, including, for example, Chinese Hamster Ovary (CHO) cells. An exemplary vector for mammalian cell expression is the HZ24 expression vector. The HZ24 expression vector was derived from the pCI vector backbone (Promega). It contains DNA encoding the Beta-lactamase resistance gene (AmpR), an F1 origin of replication, a Cytomegalovirus immediate-early enhancer/promoter region (CMV), and an SV40 late polyadenylation signal (SV40). The expression vector also has an internal ribosome entry site (IRES) from the ECMV virus (Clontech) and the mouse dihydrofolate reductase (DHFR) gene.

[0514] Viral vectors, such as adenovirus, retrovirus or vaccinia virus vectors, can be employed. In some examples, the vector is a defective or attenuated retroviral or other viral vector (see U.S. Pat. No. 4,980,286). For example, a retroviral vector can be used (see Miller et al., Meth. Enzymol. 217: 581-599 (1993)). These retroviral vectors have been modified to delete retroviral sequences that are not necessary for packaging of the viral genome and integration into host cell DNA.

[0515] In some examples, viruses armed with a nucleic acid encoding a modified PH20 polypeptide can facilitate their replication and spread within a target tissue for example. The target tissue can be a cancerous tissue whereby the virus is capable of selective replication within the tumor. The virus can also be a non-lytic virus wherein the virus selectively replicates under a tissue specific promoter. As the viruses replicate, the coexpression of the PH20 polypeptide with viral genes will facilitate the spread of the virus in vivo.

[0516] 4. Expression

[0517] Modified PH20 polypeptides can be produced by any method known to those of skill in the art including in vivo and in vitro methods. Desired proteins can be expressed in any organism suitable to produce the required amounts and forms of the proteins, such as for example, those needed for administration and treatment. Expression hosts include prokaryotic and eukaryotic organisms such as E. coli, yeast, plants, insect cells, mammalian cells, including human cell lines and transgenic animals. Expression hosts can differ in their protein production levels as well as the types of post-translational modifications that are present on the expressed proteins. The choice of expression host can be made based on these and other factors, such as regulatory and safety considerations, production costs and the need and methods for purification.

[0518] Many expression vectors are available and known to those of skill in the art and can be used for expression of proteins. The choice of expression vector will be influenced by the choice of host expression system. In general, expression vectors can include transcriptional promoters and optionally enhancers, translational signals, and transcriptional and translational termination signals. Expression vectors that are used for stable transformation typically have a selectable marker which allows selection and maintenance of the transformed cells. In some cases, an origin of replication can be used to amplify the copy number of the vector.

[0519] Modified PH20 polypeptides also can be utilized or expressed as protein fusions. For example, an enzyme fusion can be generated to add additional functionality to an enzyme. Examples of enzyme fusion proteins include, but are not limited to, fusions of a signal sequence, a tag such as for localization, e.g., a 6×His or His₆ tag or a myc tag, or a tag for purification, for example, a GST fusion, and a sequence for directing protein secretion and/or membrane association.

[0520] For long-term, high-yield production of recombinant proteins, stable expression is desired. For example, cell lines that stably express a modified PH20 polypeptide can be transformed using expression vectors that contain viral origins of replication or endogenous expression elements and a selectable marker gene. Following the introduction of the vector, cells can be allowed to grow for 1-2 days in an enriched medium before they are switched to selective media. The purpose of the selectable marker is to confer resistance to selection, and its presence allows growth and recovery of cells that successfully express the introduced sequences. Resistant cells of stably transformed cells can be proliferated using tissue culture techniques appropriate to the cell types.

[0521] Any number of selection systems can be used to recover transformed cell lines. These include, but are not limited to, the herpes simplex virus thymidine kinase (Wigler, M et al. (1977) Cell, 11:223-32) and adenine phosphoribosyltransferase (Lowy, I et al. (1980) Cell, 22:817-23) genes, which can be employed in TK- or APRT-cells, respectively. Also, antimetabolite, antibiotic or herbicide resistance can be used as the basis for selection. For example, DHFR, which confers resistance to methotrexate (Wigler, M et al. (1980) Proc. Natl. Acad. Sci, 77:3567-70); npt, which confers resistance to the aminoglycosides neomycin and G-418 (Colbere-Garapin, F et al. (1981) J. Mol. Biol., 150:1-14); and als or pat, which confer resistance to chlorsulfuron and phosphinotricin acetyltransferase, respectively, can be used. Additional selectable genes have been described, for example, trpB, which allows cells to utilize indole in place of typtophan or hisD, which allows cells to utilize histinol in place of histidine (Hartman S C and R C Mulligan (1988) Proc. Natl. Acad. Sci, 85:8047-51). Visible markers, such as but not limited to, anthocyanins, beta glucuronidase and its substrate, GUS, and luciferase and its substrate luciferin, also can be used to identify transformants and also to quantify the amount of transient or stable protein expression attributable to a particular vector system (Rhodes C A et al. (1995) Methods Mol. Biol. 55:121-131).

[0522] The presence and expression of PH20 polypeptides can be monitored. For example, detection of a functional polypeptide can be determined by testing the conditioned media for hyaluronidase enzyme activity under appropriate conditions. Exemplary assays to assess the solubility and activity of expressed proteins are provided herein.

[0523] a. Prokaryotic Cells

[0524] Prokaryotes, especially E. coli, provide a system for producing large amounts of proteins. Transformation of E. coli is a simple and rapid technique well known to those of skill in the art. Expression vectors for E. coli can contain inducible promoters. Such promoters are useful for inducing high levels of protein expression and for expressing proteins that exhibit some toxicity to the host cells. Examples of inducible promoters include the lac promoter, the trp promoter, the hybrid tac promoter, the T7 and SP6 RNA promoters and the temperature regulated λPL promoter.

[0525] Proteins, such as any provided herein, can be expressed in the cytoplasmic environment of E. coli. The cytoplasm is a reducing environment, and for some molecules, this can result in the formation of insoluble inclusion bodies. Reducing agents such as dithiothreotol and β-mercaptoethanol and denaturants, such as guanidine-HCl and urea can be used to resolubilize the proteins. An alternative approach effects protein expression in the periplasmic space of bacteria which provides an oxidizing environment and chaperonin-like and disulfide isomerases, which can aid in the production of soluble protein. Typically, a leader sequence is fused to the protein to be expressed which directs the protein to the periplasm. The leader is then removed by signal peptidases inside the periplasm. Examples of periplasmic-targeting leader sequences include the pelB leader from the pectate lyase gene and the leader derived from the alkaline phosphatase gene. In some cases, periplasmic expression allows leakage of the expressed protein into the culture medium. The secretion of proteins allows quick and simple purification from the culture supernatant. Proteins that are not secreted can be obtained from the periplasm by osmotic lysis. Similar to cytoplasmic expression, in some cases proteins can become insoluble and denaturants and reducing agents can be used to facilitate solubilization and refolding. Temperature of induction and growth also can influence expression levels and solubility, typically temperatures between 25° C. and 37° C. are used. Typically, bacteria produce aglycosylated proteins. Thus, if proteins require glycosylation for function, glycosylation can be added in vitro after purification from host cells.

[0526] b. Yeast Cells

[0527] Yeasts such as Saccharomyces cerevisae, Schizosaccharomyces pombe, Yarrowia lipolytica, Kluyveromyces lactis and Pichia pastoris are well known yeast expression hosts that can be used for production of proteins, such as any described herein. Yeast can be transformed with episomal replicating vectors or by stable chromosomal integration by homologous recombination. Typically, inducible promoters are used to regulate gene expression. Examples of such promoters include GAL1, GAL7 and GAL5 and metallothionein promoters, such as CUP1, AOX1 or other Pichia or other yeast promoters. Expression vectors often include a selectable marker such as LEU2, TRP1, HIS3 and URA3 for selection and maintenance of the transformed DNA. Proteins expressed in yeast are often soluble. Co-expression with chaperonins such as Bip and protein disulfide isomerase can improve expression levels and solubility. Additionally, proteins expressed in yeast can be directed for secretion using secretion signal peptide fusions such as the yeast mating type alpha-factor secretion signal from Saccharomyces cerevisae and fusions with yeast cell surface proteins such as the Aga2p mating adhesion receptor or the Arxula adeninivorans glucoamylase. A protease cleavage site such as for the Kex-2 protease, can be engineered to remove the fused sequences from the expressed polypeptides as they exit the secretion pathway. Yeast also is capable of glycosylation at Asn-X-Ser/Thr motifs.

[0528] c. Insects and Insect Cells

[0529] Insect cells, particularly using baculovirus expression, are useful for expressing polypeptides such as PH20 polypeptides. Insect cells express high levels of protein and are capable of most of the post-translational modifications used by higher eukaryotes. Baculoviruses have a restrictive host range which improves the safety and reduces regulatory concerns of eukaryotic expression. Typical expression vectors use a promoter for high level expression such as the polyhedrin promoter of baculovirus. Commonly used baculovirus systems include a baculovirus, such as the Autographa californica nuclear polyhedrosis virus (AcNPV) or the Bombyx mori nuclear polyhedrosis virus (BmNPV), and an insect cell line, such as Sf9 derived from Spodoptera frugiperda, Pseudaletia unipuncta (A7S) and Danaus plexippus (DpN1). For high-level expression, the nucleotide sequence of the molecule to be expressed is fused immediately downstream of the polyhedrin initiation codon of the virus. Mammalian secretion signals are accurately processed in insect cells and can be used to secrete the expressed protein into the culture medium. In addition, the cell lines Pseudaletia unipuncta (A7S) and Danaus plexippus (DpN1) produce proteins with glycosylation patterns similar to mammalian cell systems. Exemplary insect cells are those that have been altered to reduce immunogenicity, including those with “mammalianized” baculovirus expression vectors and those lacking the enzyme FT3.

[0530] An alternative expression system in insect cells employs stably transformed cells. Cell lines such as the Schnieder 2 (S2) and Kc cells (Drosophila melanogaster) and C7 cells (Aedes albopictus) can be used for expression. The Drosophila metallothionein promoter can be used to induce high levels of expression in the presence of heavy metal induction with cadmium or copper. Expression vectors are typically maintained by the use of selectable markers such as neomycin and hygromycin.

[0531] D. Mammalian Expression

[0532] Mammalian expression systems can be used to express proteins including PH20 polypeptides. Expression constructs can be transferred to mammalian cells by viral infection such as by adenovirus or by direct DNA transfer such as liposomes, calcium phosphate, DEAE-dextran and by physical means such as electroporation and microinjection. Expression vectors for mammalian cells typically include an mRNA cap site, a TATA box, a translational initiation sequence (Kozak consensus sequence) and polyadenylation elements. IRES elements also can be added to permit bicistronic expression with another gene, such as a selectable marker. Such vectors often include transcriptional promoter-enhancers for high-level expression, for example the SV40 promoter-enhancer, the human cytomegalovirus (CMV) promoter and the long terminal repeat of Rous sarcoma virus (RSV). These promoter-enhancers are active in many cell types. Tissue and cell-type promoters and enhancer regions also can be used for expression. Exemplary promoter/enhancer regions include, but are not limited to, those from genes such as elastase I, insulin, immunoglobulin, mouse mammary tumor virus, albumin, alpha fetoprotein, alpha 1 antitrypsin, beta globin, myelin basic protein, myosin light chain 2, and gonadotropic releasing hormone gene control. Selectable markers can be used to select for and maintain cells with the expression construct. Examples of selectable marker genes include, but are not limited to, hygromycin B phosphotransferase, adenosine deaminase, xanthine-guanine phosphoribosyl transferase, aminoglycoside phosphotransferase, dihydrofolate reductase (DHFR) and thymidine kinase. For example, expression can be performed in the presence of methotrexate to select for only those cells expressing the DHFR gene. Fusion with cell surface signaling molecules such as TCR-ζ and Fc_{ε}RI-γ can direct expression of the proteins in an active state on the cell surface.

[0533] Many cell lines are available for mammalian expression including mouse, rat human, monkey, chicken and hamster cells. Exemplary cell lines include but are not limited to CHO, Balb/3T3, HeLa, MT2, mouse NS0 (nonsecreting) and other myeloma cell lines, hybridoma and heterohybridoma cell lines, lymphocytes, fibroblasts, Sp2/0, COS, NIH3T3, HEK293, 293S, 2B8, and HKB cells. Cell lines also are available adapted to serum-free media which facilitates purification of secreted proteins from the cell culture media. Examples include CHO-S cells (Invitrogen, Carlsbad, Calif., cat #11619-012) and the serum free EBNA-1 cell line (Pham et al., (2003) Biotechnol. Bioeng. 84:332-42.). Cell lines also are available that are adapted to grow in special mediums optimized for maximal expression. For example, DG44 CHO cells are adapted to grow in suspension culture in a chemically defined, animal product-free medium.

[0534] e. Plants

[0535] Transgenic plant cells and plants can be used to express proteins such as any described herein. Expression constructs are typically transferred to plants using direct DNA transfer such as microprojectile bombardment and PEG-mediated transfer into protoplasts, and with agrobacterium-mediated transformation. Expression vectors can include promoter and enhancer sequences, transcriptional termination elements and translational control elements. Expression vectors and transformation techniques are usually divided between dicot hosts, such as Arabidopsis and tobacco, and monocot hosts, such as corn and rice. Examples of plant promoters used for expression include the cauliflower mosaic virus promoter, the nopaline syntase promoter, the ribose bisphosphate carboxylase promoter and the ubiquitin and UBQ3 promoters. Selectable markers such as hygromycin, phosphomannose isomerase and neomycin phosphotransferase are often used to facilitate selection and maintenance of transformed cells. Transformed plant cells can be maintained in culture as cells, aggregates (callus tissue) or regenerated into whole plants. Transgenic plant cells also can include algae engineered to produce hyaluronidase polypeptides. Because plants have different glycosylation patterns than mammalian cells, this can influence the choice of protein produced in these hosts.

[0536] 5. Purification

[0537] Host cells transformed with a nucleic acid sequence encoding a modified PH20 polypeptide can be cultured under conditions suitable for the expression and recovery of the encoded protein from cell culture. The protein produced by a recombinant cell is generally secreted, but may be contained intracellularly depending on the sequence and/or the vector used. As will be understood by those of skill in the art, expression vectors containing nucleic acid encoding PH20 can be designed with signal sequences that facilitate direct secretion of PH20 through prokaryotic or eukaryotic cell membranes.

[0538] Thus, methods for purification of polypeptides from host cells will depend on the chosen host cells and expression systems. For secreted molecules, proteins are generally purified from the culture media after removing the cells. For intracellular expression, cells can be lysed and the proteins purified from the extract. When transgenic organisms such as transgenic plants and animals are used for expression, tissues or organs can be used as starting material to make a lysed cell extract. Additionally, transgenic animal production can include the production of polypeptides in milk or eggs, which can be collected, and if necessary, the proteins can be extracted and further purified using standard methods in the art.

[0539] Proteins, such as modified PH20 polypeptides, can be purified using standard protein purification techniques known in the art including but not limited to, SDS-PAGE, size fractionation and size exclusion chromatography, ammonium sulfate precipitation and ionic exchange chromatography, such as anion exchange chromatography. Affinity purification techniques also can be utilized to improve the efficiency and purity of the preparations. For example, antibodies, receptors and other molecules that bind PH20 hyaluronidase enzymes can be used in affinity purification. For example, soluble PH20 can be purified from conditioned media.

[0540] Expression constructs also can be engineered to add an affinity tag to a protein such as a myc epitope, GST fusion or His₆ and affinity purified with myc antibody, glutathione resin or Ni-resin, respectively. Such tags can be joined to the nucleotide sequence encoding a soluble PH20 as described elsewhere herein, which can facilitate purification of soluble proteins. For example, a modified PH20 polypeptide can be expressed as a recombinant protein with one or more additional polypeptide domains added to facilitate protein purification. Such purification facilitating domains include, but are not limited to, metal chelating peptides such as histidine-tryptophan modules that allow purification on immobilized metals, protein A domains that allow purification on immobilized immunoglobulin and the domain utilized in the FLAGS extension/affinity purification system (Immunex Corp., Seattle Wash.). The inclusion of a cleavable linker sequence such as Factor XA or enterokinase (Invitrogen, San Diego, Calif.) between the purification domain and the expressed PH20 polypeptide is useful to facilitate purification. One such expression vector provides for expression of a fusion protein containing a PH20 polypeptide in and an enterokinase cleavage site. The histidine residues facilitate purification on IMIAC (immobilized metal ion affinity chromatography), while the enterokinase cleavage site provides a means for purifying the polypeptide from the fusion protein.

[0541] Purity can be assessed by any method known in the art including gel electrophoresis, orthogonal HPLC methods, staining and spectrophotometric techniques. The expressed and purified protein can be analyzed using any assay or method known to one of skill in the art, for example, any described in Section G. These include assays based on the physical and/or functional properties of the protein, including, but not limited to, analysis by gel electrophoresis, immunoassay and assays of hyaluronidase activity.

[0542] Depending on the expression system and host cells used, the resulting polypeptide can be heterogeneous due to peptidases present in the culture medium upon production and purification. For example, culture of soluble PH20 in CHO cells can result in a mixture of heterogeneous polypeptides.

[0543] 6. Modification of Polypeptides by PEGylation

[0544] Polyethylene glycol (PEG) has been widely used in biomaterials, biotechnology and medicine primarily because PEG is a biocompatible, nontoxic, water-soluble polymer that is typically nonimmunogenic (Zhao and Harris, ACS Symposium Series 680: 458-72, 1997). In the area of drug delivery, PEG derivatives have been widely used in covalent attachment (i.e., “PEGylation”) to proteins to reduce immunogenicity, proteolysis and kidney clearance and to enhance solubility (Zalipsky, Adv. Drug Del. Rev. 16:157-82, 1995). Similarly, PEG has been attached to low molecular weight, relatively hydrophobic drugs to enhance solubility, reduce toxicity and alter biodistribution. Typically, PEGylated drugs are injected as solutions.

[0545] A closely related application is synthesis of crosslinked degradable PEG networks or formulations for use in drug delivery since much of the same chemistry used in design of degradable, soluble drug carriers can also be used in design of degradable gels (Sawhney et al., Macromolecules 26: 581-87, 1993). It also is known that intermacromolecular complexes can be formed by mixing solutions of two complementary polymers. Such complexes are generally stabilized by electrostatic interactions (polyanion-polycation) and/or hydrogen bonds (polyacid-polybase) between the polymers involved, and/or by hydrophobic interactions between the polymers in an aqueous surrounding (Krupers et al., Eur. Polym J. 32:785-790, 1996). For example, mixing solutions of polyacrylic acid (PAAc) and polyethylene oxide (PEO) under the proper conditions results in the formation of complexes based mostly on hydrogen bonding. Dissociation of these complexes at physiologic conditions has been used for delivery of free drugs (i.e., non-PEGylated). In addition, complexes of complementary polymers have been formed from both homopolymers and copolymers.

[0546] Numerous reagents for PEGylation have been described in the art. Such reagents include, but are not limited to, reaction of the polypeptide with N-hydroxysuccinimidyl (NHS) activated PEG, succinimidyl mPEG, mPEG₂-N-hydroxysuccinimide, mPEG succinimidyl alpha-methylbutanoate, mPEG succinimidyl propionate, mPEG succinimidyl butanoate, mPEG carboxymethyl 3-hydroxybutanoic acid succinimidyl ester, homobifunctional PEG-succinimidyl propionate, homobifunctional PEG propionaldehyde, homobifunctional PEG butyraldehyde, PEG maleimide, PEG hydrazide, p-nitrophenyl-carbonate PEG, mPEG-benzotriazole carbonate, propionaldehyde PEG, mPEG butryaldehyde, branched mPEG₂ butyraldehyde, mPEG acetyl, mPEG piperidone, mPEG methylketone, mPEG “linkerless” maleimide, mPEG vinyl sulfone, mPEG thiol, mPEG orthopyridylthioester, mPEG orthopyridyl disulfide, Fmoc-PEG-NHS, Boc-PEG-NHS, vinylsulfone PEG-NHS, acrylate PEG-NHS, fluorescein PEG-NHS, and biotin PEG-NHS (see e.g., Monfardini et al., Bioconjugate Chem. 6:62-69, 1995; Veronese et al., J. Bioactive Compatible Polymers 12:197-207, 1997; U.S. Pat. No. 5,672,662; U.S. Pat. No. 5,932,462; U.S. Pat. No. 6,495,659; U.S. Pat. No. 6,737,505; U.S. Pat. No. 4,002,531; U.S. Pat. No. 4,179,337; U.S. Pat. No. 5,122,614; U.S. Pat. No. 5,324,844; U.S. Pat. No. 5,446,090; U.S. Pat. No. 5,612,460; U.S. Pat. No. 5,643,575; U.S. Pat. No. 5,766,581; U.S. 5,795, 569; U.S. Pat. No. 5,808,096; U.S. Pat. No. 5,900,461; U.S. Pat. No. 5,919,455; U.S. Pat. No. 5,985,263; U.S. Pat. No. 5,990,237; U.S. Pat. No. 6,113,906; U.S. Pat. No. 6,214,966; U.S. Pat. No. 6,258,351; U.S. Pat. No. 6,340,742; U.S. Pat. No. 6,413,507; U.S. Pat. No. 6,420,339; U.S. Pat. No. 6,437,025; U.S. Pat. No. 6,448,369; U.S. Pat. No. 6,461,802; U.S. Pat. No. 6,828,401; U.S. Pat. No. 6,858,736; U.S. 2001/0021763; U.S. 2001/0044526; U.S. 2001/0046481; U.S. 2002/0052430; U.S. 2002/0072573; U.S. 2002/0156047; U.S. 2003/0114647; U.S. 2003/0143596; U.S. 2003/0158333; U.S. 2003/0220447; U.S. 2004/0013637; U.S. 2004/0235734; WO05000360; U.S. 2005/0114037; U.S. 2005/0171328; U.S. 2005/0209416; EP 1064951; EP 0822199; WO 01076640; WO 0002017; WO 0249673; WO 9428024; and WO 0187925).

[0547] In one example, the polyethylene glycol has a molecular weight ranging from about 3 kD to about 50 kD, and typically from about 5 kD to about 30 kD. Covalent attachment of the PEG to the drug (known as “PEGylation”) can be accomplished by known chemical synthesis techniques. For example, the PEGylation of protein can be accomplished by reacting NHS-activated PEG with the protein under suitable reaction conditions.

[0548] While numerous reactions have been described for PEGylation, those that are most generally applicable confer directionality, utilize mild reaction conditions, and do not necessitate extensive downstream processing to remove toxic catalysts or bi-products. For instance, monomethoxy PEG (mPEG) has only one reactive terminal hydroxyl, and thus its use limits some of the heterogeneity of the resulting PEG-protein product mixture. Activation of the hydroxyl group at the end of the polymer opposite to the terminal methoxy group is generally necessary to accomplish efficient protein PEGylation, with the aim being to make the derivatised PEG more susceptible to nucleophilic attack. The attacking nucleophile is usually the epsilon-amino group of a lysyl residue, but other amines also can react (e.g., the N-terminal alpha-amine or the ring amines of histidine) if local conditions are favorable. A more directed attachment is possible in proteins containing a single lysine or cysteine. The latter residue can be targeted by PEG-maleimide for thiol-specific modification. Alternatively, PEG hydrazide can be reacted with a periodate oxidized hyaluronan-degrading enzyme and reduced in the presence of NaCNBH₃. More specifically, PEGylated CMP sugars can be reacted with a hyaluronan-degrading enzyme in the presence of appropriate glycosyl-transferases. One technique is the “PEGylation” technique where a number of polymeric molecules are coupled to the polypeptide in question. When using this technique, the immune system has difficulties in recognizing the epitopes on the polypeptide's surface responsible for the formation of antibodies, thereby reducing the immune response. For polypeptides introduced directly into the circulatory system of the human body to give a particular physiological effect (i.e., pharmaceuticals) the typical potential immune response is an IgG and/or IgM response, while polypeptides which are inhaled through the respiratory system (i.e., industrial polypeptide) potentially can cause an IgE response (i.e., allergic response). One of the theories explaining the reduced immune response is that the polymeric molecule(s) shield(s) epitope(s) on the surface of the polypeptide responsible for the immune response leading to antibody formation. Another theory or at least a partial factor is that the heavier the conjugate is, the more reduced the resulting immune response is.

[0549] Typically, to make the PEGylated PH20 polypeptide provided herein, PEG moieties are conjugated, via covalent attachment, to the polypeptides. Techniques for PEGylation include, but are not limited to, specialized linkers and coupling chemistries (see e.g., Roberts, Adv. Drug Deliv. Rev. 54:459-476, 2002), attachment of multiple PEG moieties to a single conjugation site (such as via use of branched PEGs; see e.g., Guiotto et al., Bioorg. Med. Chem. Lett. 12:177-180, 2002), site-specific PEGylation and/or mono-PEGylation (see e.g., Chapman et al., Nature Biotech. 17:780-783, 1999), and site-directed enzymatic PEGylation (see e.g., Sato, Adv. Drug Deliv. Rev., 54:487-504, 2002). Methods and techniques described in the art can produce proteins having 1, 2, 3, 4, 5, 6, 7, 8, 9, 10 or more than 10 PEG or PEG derivatives attached to a single protein molecule (see e.g., U.S. 2006/0104968).

[0550] As an exemplary illustrative method for making a PEGylated PH20 polypeptide, PEG aldehydes, succinimides and carbonates have each been applied to conjugate PEG moieties, typically succinimidyl PEGs, to rHuPH20. For example, rHuPH20 has been conjugated with exemplary succinimidyl methoxyPEG (mPEG) reagents including mPEG-Succinimidyl Propionates (mPEG-SPA), mPEG-Succinimidyl Butanoates (mPEG-SBA), and (for attaching “branched” PEGs) mPEG2-N-Hydroxylsuccinimide. These PEGylated succinimidyl esters contain different length carbon backbones between the PEG group and the activated cross-linker, and either a single or branched PEG group. These differences can be used, for example, to provide for different reaction kinetics and to potentially restrict sites available for PEG attachment to rHuPH20 during the conjugation process.

[0551] Succinimidyl PEGs (as above) containing either linear or branched PEGs can be conjugated to PH20. PEGs can used to generate PH20s reproducibly containing molecules having, on the average, between about three to six or three to six PEG molecules per hyaluronidase. Such PEGylated rHuPH20 compositions can be readily purified to yield compositions having specific activities of approximately 25,000 or 30,000 Unit/mg protein hyaluronidase activity, and being substantially free of non-PEGylated PH20 (less than 5% non-PEGylated).

[0552] Using various PEG reagents, exemplary versions of a PEGylated PH20 polypeptide can be prepared, for example, using mPEG-SBA (30 kD), mPEG-SMB (30 kD), and branched versions based on mPEG2-NHS (40 kD) and mPEG2-NHS (60 kD). PEGylated versions of PH20 can be generated using NHS chemistries, as well as carbonates, and aldehydes, using each of the following reagents: mPEG2-NHS-40K branched, mPEG-NHS-10K branched, mPEG-NHS-20K branched, mPEG2-NHS-60K branched; mPEG-SBA-5K, mPEG-SBA-20K, mPEG-SBA-30K; mPEG-SMB-20K, mPEG-SMB-30K; mPEG-butyrldehyde; mPEG-SPA-20K, mPEG-SPA-30K; and PEG-NHS-5K-biotin. PEGylated PH20 also can be prepared using PEG reagents available from Dowpharma, a division of Dow Chemical Corporation; including PH20 polypeptides PEGylated with Dowpharma's p-nitrophenyl-carbonate PEG (30 kDa) and with propionaldehyde PEG (30 kDa).

[0553] In one example, the PEGylation includes conjugation of mPEG-SBA, for example, mPEG-SBA-30K (having a molecular weight of about 30 kDa) or another succinimidyl ester of a PEG butanoic acid derivative, to a PH20 polypeptide. Succinimidyl esters of PEG butanoic acid derivatives, such as mPEG-SBA-30K readily couple to amino groups of proteins. For example, covalent conjugation of m-PEG-SBA-30K and rHuPH20 (which is approximately 60 KDa in size) provides stable amide bonds between rHuPH20 and mPEG, as shown in Scheme 1, below.

[chemical structure]

[0554] Typically, the mPEG-SBA-30K or other PEG is added to the PH20 polypeptide at a PEG:polypeptide molar ratio of 10:1 in a suitable buffer, e.g., 130 mM NaCl/10 mM HEPES at pH 6.8 or 70 mM phosphate buffer, pH 7, followed by sterilization, e.g., sterile filtration, and continued conjugation, for example, with stirring, overnight at 4° C. in a cold room. In one example, the conjugated PEG-PH20 is concentrated and buffer-exchanged.

[0555] Other methods of coupling succinimidyl esters of PEG butanoic acid derivatives, such as mPEG-SBA-30K are known in the art (see e.g., U.S. Pat. No. 5,672,662; U.S. Pat. No. 6,737,505; and U.S. 2004/0235734). For example, a polypeptide, such as a PH20 polypeptide, can be coupled to an NHS activated PEG derivative by reaction in a borate buffer (0.1 M, pH 8.0) for one hour at 4° C. The resulting PEGylated protein can be purified by ultrafiltration. Another method reacts polypeptide with mPEG-SBA in deionized water to which triethylamine is added to raise the pH to 7.2-9. The resulting mixture is stirred at room temperature for several hours to complete the PEGylation.

[0556] Methods for PEGylation of PH20 polypeptides, including, for example, animal-derived hyaluronidases and bacterial hyaluronan-degrading enzymes, are known to one of skill in the art. See, for example, European Patent No. EP 0400472, which describes the PEGylation of bovine testes hyaluronidase and chondroitin ABC lyase. Also, U.S. Publication No. 2006014968 describes PEGylation of a human hyaluronidase derived from human PH20. For example, the PEGylated hyaluronan-degrading enzyme generally contains at least 3 PEG moieties per molecule. In some examples, the PH20 polypeptide contains three to six PEG molecules. In other examples, the enzyme can have a PEG to protein molar ratio between 5:1 and 9:1, for example, 7:1.

### F. PHARMACEUTICAL COMPOSITIONS AND FORMULATIONS, DOSAGES AND ADMINISTRATION

[0557] Pharmaceutical compositions of any of the modified PH20 polypeptides set forth in Section C above are provided herein for administration. Pharmaceutical compositions, in particular liquid formulations, can be limited by the stability of the active agent, which can be susceptible to effects of storage conditions (time or length of storage, temperature and/or agitation) and/or formulation components contained in the composition. In particular, many pharmaceutical compositions require refrigeration for storage, or are stable without refrigeration for a limited time. For example, a commercial preparation of a recombinant soluble PH20 hyaluronidase (Hylenex®) is recommended for storage at room temperatures less than or equal to 25° C. for a time period not to exceed 48 hours. This can limit the applications of PH20 hyaluronidase containing pharmaceutical compositions. In particular, shipping and handling practices often require or otherwise expose a pharmaceutical composition to ambient temperatures of 18° C. to 25° C. or greater than 25° C. for more than 48 hours. Also, sustained delivery devices, such as implantable devices, also require exposure of the enzyme to elevated temperatures (e.g. 30° C. to 37° C.) for periods of time that can be destabilizing to the protein. Finally, refrigeration is not always a convenient option in many regions or countries, which can further expose the pharmaceutical composition to elevated ambient temperatures greater than 25° C. that can be destabilizing to the protein. This is particularly a concern in tropical climates.

[0558] The pharmaceutical compositions herein that contain any of the modified PH20 uber-thermophiles provided herein, are stable as a liquid formulation for prolonged periods of time greater than 48 hours under non-refrigerated conditions. Hence, the pharmaceutical compositions exhibit thermal stability (i.e. active agent retains at least 50% of the hyaluronidase activity) for at least 72 hours, 96 hours, 120 hours, 144 hours, one week, two weeks, three weeks, one month, two months, three months, four months, five months, six months or more under non-refrigerated conditions. For example, the pharmaceutical compositions exhibit the thermal stability under room temperature or elevated ambient temperature conditions, such as temperature conditions that exist in tropical climates. Such activity can be retained upon fluctuating temperature conditions that exist in non-refrigerated environments. For example, the modified PH20 uber-thermophiles provided herein are stable (i.e. active agent retains at least 50% of the hyaluronidase activity) as a liquid formulation at temperatures in the range of 18° C. to 25° C. for at least 72 hours, for at least 72 hours, 96 hours, 120 hours, 144 hours, one week, two weeks, three weeks, one month, two months, three months, four months, five months, six months or more. In other examples, the modified PH20 uber-thermophiles provided herein are stable (i.e. active agent retains at least 50% of the hyaluronidase activity) as a liquid formulation at temperatures greater than 25° C. for at least 72 hours, for at least 72 hours, 96 hours, 120 hours, 144 hours, one week, two weeks, three weeks, one month, two months, three months, four months, five months, six months or more.

[0559] In particular, the thermal stability of the pharmaceutical compositions provided herein is achieved without refrigeration in the presence of continuous, variable or intermittent temperatures greater than 25° C. In one example, the pharmaceutical compositions provided herein exhibit thermal stability under non-refrigerated conditions that expose the composition to continuous, variable or intermittent temperatures of greater than 25° C. for at least 72 hours, 96 hours, 120 hours, 144 hours, one week, two weeks, three weeks, one month, two months, three months, four months, five months, six months or more. For example, the pharmaceutical compositions provided herein exhibit thermal stability under non-refrigerated conditions that expose the composition to continuous, variable or intermittent temperatures of between 28° C. to 42° C. or 30° C. to 37° C., each exclusive, for at least 72 hours, 96 hours, 120 hours, 144 hours, one week, two weeks, three weeks, one month, two months, three months, four months, five months, six months or more.

[0560] The increased stability is characterized by improved storage time, decreased fragmentation, and/or decreased aggregate formation, while still retaining the activity of the active agent(s), e.g., the PH20 hyaluronidase. Such formulations can be provided as “ready-to use” liquid formulations without further reconstitution and/or without any requirement for further dilution. In some examples, the formulations also can be prepared in a lyophilized or concentrated form.

[0561] 1. Formulations—Liquids, Injectables, Emulsions

[0562] Pharmaceutically acceptable compositions are prepared in view of approvals for a regulatory agency or other agency prepared in accordance with generally recognized pharmacopeia for use in animals and in humans. Typically, the compounds are formulated into pharmaceutical compositions using techniques and procedures well known in the art (see e.g., Ansel Introduction to Pharmaceutical Dosage Forms, Fourth Edition, 1985, 126).

[0563] The formulation generally is made to suit the route of administration. Compositions can take the form of solutions, suspensions, emulsions, tablets, pills, capsules, powders, and sustained release formulations. A composition can be formulated as a suppository, with traditional binders and carriers such as triglycerides. Oral formulation can include standard carriers such as pharmaceutical grades of mannitol, lactose, starch, magnesium stearate, sodium saccharine, cellulose, magnesium carbonate, and other such agents. Topical formulations also are contemplated. The formulation should suit the mode of administration.

[0564] Parenteral administration, generally characterized by injection or infusion, either subcutaneously, intramuscularly, intravenously or intradermally is contemplated herein. Preparations for parenteral administration include sterile solutions ready for injection, sterile dry soluble products, such as lyophilized powders, ready to be combined with a solvent just prior to use, including hypodermic tablets, sterile suspensions ready for injection, sterile dry insoluble products ready to be combined with a vehicle just prior to use and sterile emulsions. Injectables can be prepared in conventional forms, either as liquid solutions or suspensions, solid forms suitable for solution or suspension in liquid prior to injection, or as emulsions. For example, the compositions containing a modified PH20 polypeptide, formulated separately or co-formulated with another therapeutic agent, can be provided as a pharmaceutical preparation in liquid form as a solution, syrup or suspension. In liquid form, the pharmaceutical preparations can be provided as a concentrated preparation to be diluted to a therapeutically effective concentration before use. Generally, the preparations are provided in a dosage form that does not require dilution for use. In another example, pharmaceutical preparations can be presented in lyophilized form for reconstitution with water or other suitable vehicle before use.

[0565] Injectables are designed for local and systemic administration. For purposes herein, local administration is desired for direct administration to the affected interstitium. The solutions can be either aqueous or nonaqueous. If administered intravenously, suitable carriers include physiological saline or phosphate buffered saline (PBS), and solutions containing thickening and solubilizing agents, such as glucose, polyethylene glycol, and polypropylene glycol and mixtures thereof.

[0566] The concentration of the pharmaceutically active compound is adjusted so that an injection or infusion provides an effective amount to produce the desired pharmacological effect. The exact dose depends on the age, weight and condition of the patient or animal as is known in the art. The unit-dose parenteral preparations can be packaged in, for example, an ampoule, a cartridge, a vial or a syringe with a needle. The volume of liquid solution or reconstituted powder preparation, containing the pharmaceutically active compound, is a function of the disease to be treated and the particular article of manufacture chosen for package. All preparations for parenteral administration must be sterile, as is known and practiced in the art. The percentage of active compound contained in such parenteral compositions is highly dependent on the specific nature thereof, as well as the activity of the compound and the needs of the subject.

[0567] Pharmaceutical compositions can include carriers or other excipients. For example, pharmaceutical compositions provided herein can contain any one or more of a diluents(s), adjuvant(s), antiadherent(s), binder(s), coating(s), filler(s), flavor(s), color(s), lubricant(s), glidant(s), preservative(s), detergent(s), sorbent(s) or sweetener(s) and a combination thereof or vehicle with which a modified PH20 polypeptide is administered. For example, pharmaceutically acceptable carriers or excipients used in parenteral preparations include aqueous vehicles, nonaqueous vehicles, antimicrobial agents, isotonic agents, buffers, antioxidants, local anesthetics, suspending and dispersing agents, emulsifying agents, sequestering or chelating agents and other pharmaceutically acceptable substances. Formulations, including liquid preparations, can be prepared by conventional means with pharmaceutically acceptable additives or excipients.

[0568] Examples of suitable pharmaceutical carriers are described in “Remington's Pharmaceutical Sciences” by E. W. Martin. Such compositions will contain a therapeutically effective amount of the compound, generally in purified form, together with a suitable amount of carrier so as to provide the form for proper administration to the patient. Such pharmaceutical carriers can be sterile liquids, such as water or oils, including those of petroleum, animal, vegetable or synthetic origin, such as peanut oil, soybean oil, mineral oil, and sesame oil. Water is a typical carrier when the pharmaceutical composition is administered intravenously. Saline solutions and aqueous dextrose and glycerol solutions also can be employed as liquid carriers, particularly for injectable solutions. Examples of aqueous vehicles include Sodium Chloride Injection, Ringers Injection, Isotonic Dextrose Injection, Sterile Water Injection, Dextrose and Lactated Ringers Injection. Nonaqueous parenteral vehicles include fixed oils of vegetable origin, cottonseed oil, corn oil, sesame oil and peanut oil. Suspending and dispersing agents include, but are not limited to, sorbitol syrup, cellulose derivatives or hydrogenated edible fats, sodium carboxymethylcellulose, hydroxypropyl methylcellulose and polyvinylpyrrolidone. Emulsifying agents include, but are not limited to, lecithin or acacia. Detergents include, but are not limited to, Polysorbate 80 (TWEEN 80). Non-aqueous vehicles include, but are not limited to, almond oil, oily esters, or fractionated vegetable oils. Anti-microbial agents or preservatives include, but are not limited to, methyl or propyl-p-hydroxybenzoates or sorbic acid, m-cresol, phenol. A diluent includes, but is not limited to, lactose, sucrose, dicalcium phosphate, or carboxymethylcellulose. A lubricant includes, but is not limited to, magnesium stearate, calcium stearate or talc. A binder includes, but is not limited to, starch, natural gums, such as gum acacia, gelatin, glucose, molasses, polyvinylpyrrolidine, celluloses and derivatives thereof, povidone, crospovidones and other such binders known to those of skill in the art. Isotonic agents include, but are not limited to, sodium chloride and dextrose. Buffers include, but are not limited to, phosphate and citrate. Antioxidants include sodium bisulfate. Local anesthetics include procaine hydrochloride. A sequestering or chelating agent of metal ions includes EDTA. Other suitable pharmaceutical excipients include, but are not limited to, starch, glucose, lactose, dextrose, sucrose, gelatin, malt, rice, flour, chalk, silica gel, sodium stearate, glycerol monostearate, talc, sodium chloride, dried skim milk, glycerol, propylene, glycol, saline, water, and ethanol. Pharmaceutical carriers also include ethyl alcohol, polyethylene glycol and propylene glycol for water miscible vehicles and sodium hydroxide, hydrochloric acid, citric acid or lactic acid for pH adjustment. A composition, if desired, also can contain minor amounts of non-toxic auxiliary substances such as wetting or emulsifying agents, or pH buffering agents, for example, acetate, sodium citrate, cyclodextrin derivatives, sorbitan monolaurate, triethanolamine sodium acetate, triethanolamine oleate, stabilizers, solubility enhancers, and other such agents such as for example, sodium acetate, sodium phosphate, sorbitan monolaurate, triethanolamine oleate and cyclodextrins.

[0569] In particular, antimicrobial agents (e.g., preservatives) in bacteriostatic or fungistatic concentrations (e.g., an anti-microbial effective amount) can be added to parenteral preparations packaged in multiple-dose containers, which include phenols or cresols, mercurials, benzyl alcohol, chlorobutanol, methyl and propyl p-hydroxybenzoic acid esters, thimerosal, benzalkonium chloride and benzethonium chloride.

[0570] The volume of the formulations, including the separately formulated or co-formulated PH20-containing formulations provided herein, can be any volume suitable for the container in which it is provided. In some examples, the formulations are provided in a vial, syringe, or any other suitable container. For example, the formulations provided herein are between or about between 0.1 mL to 500 mL, such as 0.1 mL to 100 mL, 1 mL to 100 mL, 0.1 mL to 50 mL, such as at least or about at least or about or is 0.1 mL, 1 mL, 2 mL, 3 mL, 4 mL, 5 mL, 10 mL, 15 mL, 20 mL, 30 mL, 40 mL, 50 mL or more.

[0571] a. Lyophilized Powders

[0572] Of interest herein are lyophilized powders, which can be reconstituted for administration as solutions, emulsions and other mixtures. They may also be reconstituted and formulated as solids or gels.

[0573] The sterile, lyophilized powder is prepared by dissolving a compound of enzyme in a buffer solution. The buffer solution may contain an excipient which improves the stability or other pharmacological component of the powder or reconstituted solution, prepared from the powder. Subsequent sterile filtration of the solution followed by lyophilization under standard conditions known to those of skill in the art provides the desired formulation. A liquid formulation as described herein above can be prepared. The resulting mixture is sterile filtered or treated to remove particulates and to insure sterility, and apportioned into vials for lyophilization. For example, the lyophilized powder can be prepared by dissolving an excipient, such as dextrose, sorbitol, fructose, corn syrup, xylitol, glycerin, glucose, sucrose or other suitable agent, in a suitable buffer, such as citrate, sodium or potassium phosphate or other such buffer known to those of skill in the art. Then, a selected enzyme is added to the resulting mixture, and stirred until it dissolves.

[0574] Each vial is made to contain a single dosage or multiple dosages of the compound. The lyophilized powder can be stored under appropriate conditions, such as at about 4° C. to room temperature. Reconstitution of this lyophilized powder with an appropriate buffer solution provides a formulation for use in parenteral administration.

[0575] b. Exemplary Formulations

[0576] Single dose formulations of PH20 are known in the art. For example, Hylenex® recombinant (hyaluronidase human injection) contains, per mL, 8.5 mg NaCl (145 mM), 1.4 mg dibasic sodium phosphate (9.9 mM), 1.0 mg human albumin, 0.9 mg edetate disodium (2.4 mM), 0.3 mg CaCl₂ (2.7 mM) and NaOH to adjust the pH to 7.4. Other formulations of human soluble hyaluronidase, such as the rHuPH20 formulations described in U.S. Pat. Pub. No. US2011/0053247, include 130 mM NaCl, 10 mM HEPES, pH 7.0; or 10 mM histidine, 130 mM NaCl, pH 6.0. Any of the modified PH20 polypeptides provided herein can be similarly formulated.

[0577] In addition to a therapeutically effective amount of a modified PH20 polypeptide and/or other therapeutic agent, exemplary pharmaceutical compositions provided herein, including separately formulated- and co-formulated-PH20 containing formulations are prepared at a requisite pH to maintain the stability of the active agent(s) (e.g., PH20 hyaluronidase and/or other co-formulated therapeutic agent). Such formulations also can contain a concentration of salt, such as NaCl.

[0578] For multi-dose formulations and other formulations stored for a prolonged time, the compositions generally also contain one or more preservatives. Generally, because the PH20 hyaluronidases are thermally stable, further stabilizing agents are not required. Depending on the application and purpose of the composition, however, further stabilizing agents and other excipients also can be included. Such inclusion is within the level of a skilled artisan to empirically determine Exemplary components are described below.

[0579] i. pH and Buffer

[0580] In examples herein, the pharmaceutical compositions provided herein are prepared at a pH of between or about between 6.5 to 7.8 such as between or about between 6.5 to 7.2, 7.0 to 7.8, 7.0 to 7.6 or 7.2 to 7.4. Reference to pH herein is based on measurement of pH at room temperature. It is understood that the pH can change during storage over time, but typically will remain between or between about pH 6.5 to or to about 7.8. For example, the pH can vary by ±0.1, 0.2, 0.3, 0.4, 0.5, 0.6, 0.7, 0.8, 0.9, 1.0, 1.2, 1.3, 1.4, 1.5 or more. Exemplary co-formulations provided herein have a pH of or of about 7.0±0.2, 7.1±0.2, 7.2±0.2, 7.3±0.2, 7.4±0.2, 7.5±0.2 or 7.6±0.2 when prepared. If necessary, pH can be adjusted using acidifying agents to lower the pH or alkalizing agents to increase the pH. Exemplary acidifying agents include, but are not limited to, acetic acid, citric acid, sulfuric acid, hydrochloric acid, monobasic sodium phosphate solution, and phosphoric acid. Exemplary alkalizing agents include, but are not limited to, dibasic sodium phosphate solution, sodium carbonate, or sodium hydroxide.

[0581] The compositions are generally prepared using a buffering agent that maintains the pH range. Any buffer can be used in formulations provided herein so long as it does not adversely affect the stability of the active agent(s) (e.g., PH20 hyaluronidase), and supports the requisite pH range required. Examples of particularly suitable buffers include Tris, succinate, acetate, phosphate buffers, citrate, aconitate, malate and carbonate. Those of skill in the art, however, will recognize that formulations provided herein are not limited to a particular buffer, so long as the buffer provides an acceptable degree of pH stability, or “buffer capacity” in the range indicated. Generally, a buffer has an adequate buffer capacity within about 1 pH unit of its pK (Lachman et al. In: The Theory and Practice of Industrial Pharmacy 3rd Edn. (Lachman, L., Lieberman, H A. and Kanig, J. L., Eds.), Lea and Febiger, Philadelphia, p. 458-460, 1986). Buffer suitability can be estimated based on published pK tabulations or can be determined empirically by methods well known in the art. The pH of the solution can be adjusted to the desired endpoint within the range as described above, for example, using any acceptable acid or base.

[0582] Buffers that can be included in the co-formulations provided herein include, but are not limited to, Tris (Tromethamine), histidine, phosphate buffers, such as dibasic sodium phosphate, and citrate buffers. Such buffering agents can be present in the compositions at concentrations between or about between 1 mM to 100 mM, such as 10 mM to 50 mM or 20 mM to 40 mM, such as at or about 30 mM. For example, such buffering agents can be present in the compositions in a concentration of or about 1 mM, 2 mM, 3 mM, 4 mM, 5 mM, 6 mM, 7 mM, 8 mM, 9 mM, 10 mM, 11 mM, 12 mM, 13 mM, 14 mM, 15 mM, 16 mM, 17 mM, 18 mM, 19 mM, 20 mM, 25 mM, 30 mM, 35 mM, 40 mM, 45 mM, 50 mM, 55 mM, 60 mM, 65 mM, 70 mM, 75 mM, or more.

[0583] ii. Salt (e.g. NaCl)

[0584] In examples herein, the pharmaceutical compositions provided herein contain a concentration of salt, such as sodium chloride (NaCl), which can be required for activity of the PH20 hyaluronidase). In particular examples herein, the pharmaceutical compositions, including the separately formulated or co-formulated PH20-containing formulations provided herein, contain salt, such as NaCl, at a concentration of between or about between 10 mM to 200 mM, 50 mM to 200 mM, 80 mM to 160 mM, 100 mM to 140 mM, 120 mM to 180 mM, 140 mM to 180 mM, 120 mM to 160 mM, 130 mM to 150 mM, 80 mM to 140 mM.

[0585] Low salt concentrations of generally less than 120 mM can have deleterious effects on PH20 activity over time and depending on temperature conditions. Hence, the absence of salt (e.g. NaCl) or a low concentration of salt (e.g. NaCl) can result in instability of the protein. In the pharmaceutical compositions provided herein, due to the thermal stability achieved by the modified PH20 polypeptides provided herein, lower concentrations of salt (e.g. NaCl) can be suitable to maintain and preserve hyaluronidase activity. Hence, in examples herein, pharmaceutical compositions can contain an amount of salt (e.g. NaCl) that is less than 130 mM, such as such as 10 mM to 120 mM, 50 mM to 120 mM, 80 mM to 120 mM, 50 mM to 100 mM, 50 mM to 90 mM, 80 mM to 100 mM or 10 mM to 50 mM, each inclusive.

[0586] iii. Preservative(s)

[0587] In examples herein, multi-dose formulations or formulations stored for prolonged periods contain an anti-microbially effective amount of preservative or mixture of preservatives in an amount to have a bacteriostatic or fungistatic effect. The amount of preservative(s) is an amount that maintains the activity of the active agent(s) (e.g. PH20 hyaluronidase).

[0588] Non-limiting examples of preservatives that can be included in the compositions or co-formulations provided herein include, but are not limited to, phenol, meta-cresol (m-cresol), methylparaben, benzyl alcohol, thimerosal, benzalkonium chloride, 4-chloro-1-butanol, chlorhexidine dihydrochloride, chlorhexidine digluconate, L-phenylalanine, EDTA, bronopol (2-bromo-2-nitropropane-1,3-diol), phenylmercuric acetate, glycerol (glycerin), imidurea, chlorhexidine, sodium dehydroacetate, ortho-cresol (o-cresol), para-cresol (p-cresol), chlorocresol, cetrimide, benzethonium chloride, ethylparaben, propylparaben or butylparaben and any combination thereof. For example, formulations provided herein can contain a single preservative. In other examples, the formulations contain at least two different preservatives or at least three different preservatives. For example, formulations provided herein can contain two preservatives such as L-phenylalanine and m-cresol, L-phenylalanine and methylparaben, L-phenylalanine and phenol, m-cresol and methylparaben, phenol and methylparaben, m-cresol and phenol or other similar combinations.

[0589] In the formulations provided herein, the total amount of the one or more preservative agents as a percentage (%) of mass concentration (w/v) in the formulation can be, for example, between from or between about from 0.1% to 0.4%, such as 0.1% to 0.3%, 0.15% to 0.325%, 0.15% to 0.25%, 0.1% to 0.2%, 0.2% to 0.3%, or 0.3% to 0.4%. Generally, the formulations contain less than 0.4% (w/v) preservative. For example, the co-formulations provided herein contain at least or about at least 0.1%, 0.12%, 0.125%, 0.13%, 0.14%, 0.15%, 0.16% 0.17%, 0.175%, 0.18%, 0.19%, 0.2%, 0.25%, 0.3%, 0.325%, 0.35% but less than 0.4% total preservative.

[0590] iv. Stabilizers

[0591] In examples herein, the pharmaceutical compositions provided herein optionally can contain one or more other stabilizing agent to maintain the stability of the PH20 hyaluronidase. In some examples provided herein, pharmaceutical compositions do not contain a stabilizing agent that is an amino acids, amino acid derivatives, amines, sugars, polyols, surfactants, a hyaluronidase inhibitor or other substrate or an albumin protein (e.g. human albumin) In other examples provided herein, the pharmaceutical compositions contain one or more stabilizing agents from among a stabilizing agent that is an amino acids, amino acid derivatives, amines, sugars, polyols, surfactants, a hyaluronidase inhibitor or other substrate or an albumin protein (e.g. human albumin)

[0592] Included among the types of stabilizers that can optionally be contained in the formulations provided herein are amino acids, amino acid derivatives, amines, sugars, polyols, salts and buffers, surfactants, and other agents. For example, the formulations herein contain at least contain a surfactant and an appropriate buffer. Optionally, the formulations provided herein can contain other additional stabilizers. Other components include, for example, one or more tonicity modifiers, one or more anti-oxidation agents, or other stabilizer.

[0593] Exemplary amino acid stabilizers, amino acid derivatives or amines include, but are not limited to, L-Arginine, Glutamine, Glycine, Lysine, Methionine, Proline, Lys-Lys, Gly-Gly, Trimethylamine oxide (TMAO) or betaine. Exemplary sugars and polyols include, but are not limited to, glycerol, sorbitol, mannitol, inositol, sucrose or trehalose. Exemplary salts and buffers include, but are not limited to, magnesium chloride, sodium sulfate, Tris such as Tris (100 mM), or sodium Benzoate. Exemplary surfactants include, but are not limited to, poloxamer 188 (e.g., Pluronic® F68), polysorbate 80 (PS80), polysorbate 20 (PS20). Other stabilizers include, but are not limited to, hyaluronic acid (HA), human serum albumin (HSA), phenyl butyric acid, taurocholic acid, polyvinylpyrolidone (PVP) or zinc.

[0594] For example, surfactants can inhibit aggregation of PH20 and minimize absorptive loss. The surfactants generally are non-ionic surfactants. Surfactants that can be included in the formulations herein include, but are not limited to, partial and fatty acid esters and ethers of polyhydric alcohols such as of glycerol, or sorbitol, poloxamers and polysorbates. For example, exemplary surfactants in the -formulations herein include any one or more of poloxamer 188 (PLURONICS® such as PLURONIC® F68), TETRONICS®, polysorbate 20, polysorbate 80, PEG 400, PEG 3000, Tween® (e.g., Tween® 20 or Tween® 80), Triton® X-100, SPAN®, MYRJ®, BRIJ®, CREMOPHOR®, polypropylene glycols or polyethylene glycols. In some examples, the formulations herein contain poloxamer 188, polysorbate 20, polysorbate 80, generally poloxamer 188 (Pluronic® F68).

[0595] In the formulations provided herein, the total amount of the one or more surfactants as a percentage (%) of mass concentration (w/v) in the formulation can be, for example, between from or between about from 0.005% to 1.0%, such as between from or between about from 0.01% to 0.5%, such as 0.01% to 0.1% or 0.01% to 0.02%. Generally, the formulations contain at least 0.01% surfactant and contain less than 1.0%, such as less than 0.5% or less than 0.1% surfactant. For example, the formulations provided herein can contain at or about 0.001%, 0.005%, 0.01%, 0.015%, 0.02%, 0.025%, 0.03%, 0.035%, 0.04%, 0.045%, 0.05%, 0.055%, 0.06%, 0.065%, 0.07%, 0.08%, or 0.09% surfactant. In particular examples, the formulations provided herein contain or contain about 0.01% to or to about 0.05% surfactant.

[0596] Tonicity modifiers can be included in the formulation provided herein to produce a solution with the desired osmolality. The formulations provided herein have an osmolality of between or about between 245 mOsm/kg to 305 mOsm/kg. For example, the osmolality is or is about 245 mOsm/kg, 250 mOsm/kg, 255 mOsm/kg, 260 mOsm/kg, 265 mOsm/kg, 270 mOsm/kg, 275 mOsm/kg, 280 mOsm/kg, 285 mOsm/kg, 290 mOsm/kg, 295 mOsm/kg, 300 mOsm/kg or 305 mOsm/kg. In some examples, the formulations have an osmolality of or of about 275 mOsm/kg. Tonicity modifiers include, but are not limited to, glycerin, NaCl, amino acids, polyalcohols, trehalose, and other salts and/or sugars. The particular amount can be empirically determined in order to retain enzyme activity, and/or tonicity.

[0597] In other instances, glycerin (glycerol) is included in the formulations. For example, formulations provided herein typically contain less than 60 mM glycerin, such as less than 55 mM, less than 50 mM, less than 45 mM, less than 40 mM, less than 35 mM, less than 30 mM, less than 25 mM, less than 20 mM, less than 15 mM, 10 mM or less. The amount of glycerin typically depends on the amount of NaCl present: the more NaCl present in the formulation, the less glycerin is required to achieve the desired osmolality or osmolarity. Thus, for example, in formulations containing higher NaCl concentrations, little or no glycerin need be included in the formulation. In contrast, in formulations containing slightly lower NaCl concentrations, glycerin can be included. For example, formulations provided herein can contain glycerin at a concentration of 40 mM to 60 mM, such as less than 50 mM, such as 20 mM to 50 mM, for example at or about 50 mM.

[0598] The formulations provided herein also can contain antioxidants to reduce or prevent oxidation, in particular oxidation of the PH20 polypeptide. For example, oxidation can be effected by high concentrations of surfactant or hyaluronan oligomers. Exemplary antioxidants include, but are not limited to, cysteine, tryptophan and methionine. In particular examples, the anti-oxidant is methionine. The formulations provided herein can include an antioxidant at a concentration from between or from about between 5 mM to or to about 50 mM, such as 5 mM to 40 mM, 5 mM to 20 mM or 10 mM to 20 mM. For example, methionine can be provided in the formulations herein at a concentration from between or from about between 5 mM to or to about 50 mM, such as 5 mM to 40 mM, 5 mM to 20 mM or 10 mM to 20 mM. For example, an antioxidant, for example methionine, can be included at a concentration that is or is about 5 mM, 10 mM, 11 mM, 12 mM, 13 mM, 14 mM, 15 mM, 16 mM, 17 mM, 18 mM, 19 mM, 20 mM, 21 mM, 22 mM, 23 mM, 24 mM, 25 mM, 26 mM, 27 mM, 28 mM, 29 mM, 30 mM, 35 mM, 40 mM, 45 mM or 50 mM. In some examples, the formulations contain 10 mM to 20 mM methionine, such as or about 10 mM or 20 mM methionine.

[0599] The formulations provided herein also can contain an amino acid stabilizer, which contributes to the stability of the preparation. The stabilizer can be a non-polar or basic amino acid. Exemplary non-polar and basic amino acids include, but are not limited to, alanine, histidine, arginine, lysine, ornithine, isoleucine, valine, methionine, glycine and proline. For example, the amino acid stabilizer is glycine or proline, typically glycine. The stabilizer can be a single amino acid or it can be a combination of 2 or more such amino acids. The amino acid stabilizers can be natural amino acids, amino acid analogues, modified amino acids or amino acid equivalents. Generally, the amino acid is an L-amino acid. For example, when proline is used as the stabilizer, it is generally L-proline. It is also possible to use amino acid equivalents, for example, proline analogues. The concentration of amino acid stabilizer, for example glycine, included in the formulation ranges from 0.1 M to 1 M amino acid, typically 0.1 M to 0.75 M, generally 0.2 M to 0.5 M, for example, at least at or about 0.1 M, 0.15 M, 0.2 M, 0.25 M, 0.3 M, 0.35 M, 0.4 M, 0.45 M, 0.5 M, 0.6 M, 0.7 M, 0.75 M or more amino acid. The amino acid, for example glycine, can be used in a form of a pharmaceutically acceptable salt, such as hydrochloride, hydrobromide, sulfate, acetate, etc. The purity of the amino acid, for example glycine, should be at least 98%, at least 99%, or at least 99.5% or more.

[0600] In examples herein, if necessary, hyaluronidase inhibitors are included in a formulation to stabilize PH20, in particular to reduce the effects of otherwise destabilizing agents and conditions, such as, for example, low salt, high pH, the presence of preservatives and elevated temperatures, present in the formulation. Such a component generally is not required for pharmaceutical compositions containing a modified PH20 polypeptide as provided herein that exhibits increased stability under such conditions. When provided, the hyaluronidase inhibitor is provided at least at its equilibrium concentration. One of skill in the art is familiar with various classes of hyaluronidase inhibitors (see e.g., Girish et al. (2009) Current Medicinal Chemistry, 16:2261-2288, and references cited therein). One of skill in the art knows or can determine by standard methods in the art the equilibrium concentration of a hyaluronidase inhibitor in a reaction or stable composition herein.

[0601] An exemplary hyaluronidase inhibitor for use in the compositions herein is hyaluronan (HA). Hyaluronic acid (HA, also known as hyaluronan and hyaluronate) is the natural substrate for PH20. HA is a non-sulfated glycosaminoglycan that is widely distributed throughout connective, epithelial, and neural tissues. It is a polymer of up to 25,000 disaccharide units, themselves composed of D-glucuronic acid and D-N-acetylglucosamine. The molecular weight of HA ranges from about 5 kDa to 200,000 kDa. Any size HA can be used in the compositions as a stabilizer. In some examples, the HA is a disaccharide, composed of D-glucuronic acid and D-N-acetylglucosamine. In other examples, the HA is an oligosaccharide, such as a tetrasaccharide, containing 2 repeating disaccharide units, or alternatively, the HA can contain multiple repeating disaccharide units, such as 3, 4, 5, 6, 7, 8, 9, 10, 11, 12, 13, 14, 15, 16, 17, 18, 19, 20, 25, 30 or more disaccharide units. In another example, the HA used in the formulations provided herein has a molecular weight that is from or from about 5 kDa to or to about 5,000 kDa; from or from about 5 kDa to or to about 1,000 kDa; from or from about 5 kDa to or to about 500 kDa; or from or from about 5 kDa to or to about 200 kDa. Exemplary HA oligosaccharides for use in the formulations herein have a molecular weight of or of about 6.4 kDa, 74.0 kDa. or 234.4 kDa. The formulations can contain 1 mg/mL to 20 mg/mL HA, 8 mg/mL to 12 mg/mL, such as at least or about 1 mg/mL, 2 mg/mL, 3 mg/mL, 4 mg/mL, 5 mg/mL, 6 mg/mL, 7 mg/mL, 8 mg/mL, 9 mg/mL, 10 mg/mL, 11 mg/mL, 12 mg/mL, 13 mg/mL, 14 mg/mL, 15 mg/mL, 16 mg/mL, 17 mg/mL, 18 mg/mL, 19 mg/mL or 20 mg/mL or more HA. In some examples, the molar ratio of HA to PH20 is or is about 100,000:1, 95,000:1, 90,000:1, 85,000:1, 80,000:1, 75,000:1, 70,000:1, 65,000:1, 60,000:1, 55,000:1, 50,000:1, 45,000:1, 40,000:1, 35,000:1, 30,000:1, 25,000:1, 20,000:1, 15,000:1, 10,000:1, 5,000:1, 1,000:1, 900:1, 800:1, 700:1, 600:1, 500:1, 400:1, 300:1, 200:1, or 100:1 or less.

[0602] In some examples, a nicotinic compound is used as a stabilizing agent. Nicotinic compounds include, but are not limited to, nicotinamide, nicotinic acid, niacin, niacinamide, vitamin B3 and/or salts thereof and/or any combination thereof. In particular applications, the stabilizing agent can include a nicotinic compound an amino acid or amino acids (see e.g., International Publication No. WO2010149772). For example, the amino acid can be arginine, glutamic acid and/or salts thereof or combinations thereof

[0603] 2. Compositions for Additional Routes of Administration

[0604] Depending upon the condition treated other routes of administration, such as topical application, transdermal patches, oral and rectal administration are also contemplated herein.

[0605] For example, pharmaceutical dosage forms for rectal administration are rectal suppositories, capsules and tablets for systemic effect. Rectal suppositories include solid bodies for insertion into the rectum which melt or soften at body temperature releasing one or more pharmacologically or therapeutically active ingredients. Pharmaceutically acceptable substances utilized in rectal suppositories are bases or vehicles and agents to raise the melting point. Examples of bases include cocoa butter (theobroma oil), glycerin-gelatin, carbowax (polyoxyethylene glycol) and appropriate mixtures of mono-, di- and triglycerides of fatty acids. Combinations of the various bases may be used. Agents to raise the melting point of suppositories include spermaceti and wax. Rectal suppositories may be prepared either by the compressed method or by molding. The typical weight of a rectal suppository is about 2 to 3 gm. Tablets and capsules for rectal administration are manufactured using the same pharmaceutically acceptable substance and by the same methods as for formulations for oral administration. Formulations suitable for rectal administration can be provided as unit dose suppositories. These can be prepared by admixing the active compound with one or more conventional solid carriers, for example, cocoa butter, and then shaping the resulting mixture.

[0606] For oral administration, pharmaceutical compositions can take the form of, for example, tablets or capsules prepared by conventional means with pharmaceutically acceptable excipients such as binding agents (e.g., pregelatinized maize starch, polyvinyl pyrrolidone or hydroxypropyl methylcellulose); fillers (e.g., lactose, microcrystalline cellulose or calcium hydrogen phosphate); lubricants (e.g., magnesium stearate, talc or silica); disintegrants (e.g., potato starch or sodium starch glycolate); or wetting agents (e.g., sodium lauryl sulfate). The tablets can be coated by methods well-known in the art.

[0607] Formulations suitable for buccal (sublingual) administration include, for example, lozenges containing the active compound in a flavored base, usually sucrose and acacia or tragacanth; and pastilles containing the compound in an inert base such as gelatin and glycerin or sucrose and acacia.

[0608] Topical mixtures are prepared as described for the local and systemic administration. The resulting mixtures can be solutions, suspensions, emulsion or the like and are formulated as creams, gels, ointments, emulsions, solutions, elixirs, lotions, suspensions, tinctures, pastes, foams, aerosols, irrigations, sprays, suppositories, bandages, dermal patches or any other formulations suitable for topical administration.

[0609] The compounds or pharmaceutically acceptable derivatives thereof may be formulated as aerosols for topical application, such as by inhalation (see, e.g., U.S. Pat. Nos. 4,044,126, 4,414,209, and 4,364,923, which describe aerosols for delivery of a steroid useful for treatment of inflammatory diseases, particularly asthma). These formulations, for administration to the respiratory tract, can be in the form of an aerosol or solution for a nebulizer, or as a microfine powder for insufflation, alone or in combination with an inert carrier such as lactose. In such a case, the particles of the formulation will typically have diameters of less than 50 microns, or less than 10 microns.

[0610] The compounds can be formulated for local or topical application, such as for topical application to the skin and mucous membranes, such as in the eye, in the form of gels, creams, and lotions and for application to the eye or for intracisternal or intraspinal application. Topical administration is contemplated for transdermal delivery and also for administration to the eyes or mucosa, or for inhalation therapies. Nasal solutions of the active compound alone or in combination with other pharmaceutically acceptable excipients also can be administered.

[0611] Formulations suitable for transdermal administration are provided. They can be provided in any suitable format, such as discrete patches adapted to remain in intimate contact with the epidermis of the recipient for a prolonged period of time. Such patches contain the active compound in an optionally buffered aqueous solution of, for example, 0.1 to 0.2 M concentration with respect to the active compound. Formulations suitable for transdermal administration also can be delivered by iontophoresis (see, e.g., Tyle, P, Pharmaceutical Research 3(6):318-326 (1986)) and typically take the form of an optionally buffered aqueous solution of the active compound.

[0612] Pharmaceutical compositions also can be administered by controlled release formulations and/or delivery devices (see e.g., in U.S. Pat. Nos. 3,536,809; 3,598,123; 3,630,200; 3,845,770; 3,916,899; 4,008,719; 4,769,027; 5,059,595; 5,073,543; 5,120,548; 5,591,767; 5,639,476; 5,674,533 and 5,733,566).

[0613] 3. Dosages and Administration

[0614] The modified PH20 polypeptides provided herein can be formulated as pharmaceutical compositions for single dosage or multiple dosage administration. The PH20 polypeptide is included in an amount sufficient to exert a therapeutically useful effect in the absence of undesirable side effects on the patient treated. The therapeutically effective concentration can be determined empirically by testing the polypeptides in known in vitro and in vivo systems such as by using the assays provided herein or known in the art (see e.g., Taliani et al. (1996) Anal. Biochem., 240: 60-67; Filocamo et al. (1997) J Virology, 71: 1417-1427; Sudo et al. (1996) Antiviral Res. 32: 9-18; Bouffard et al. (1995) Virology, 209:52-59; Bianchi et al. (1996) Anal. Biochem., 237: 239-244; Hamatake et al. (1996) Intervirology 39:249-258; Steinkuhler et al. (1998) Biochem., 37:8899-8905; D'Souza et al. (1995) J Gen. Virol., 76:1729-1736; Takeshita et al. (1997) Anal. Biochem., 247:242-246; see also e.g., Shimizu et al. (1994) J. Virol. 68:8406-8408; Mizutani et al. (1996) J. Virol. 70:7219-7223; Mizutani et al. (1996) Biochem. Biophys. Res. Commun., 227:822-826; Lu et al. (1996) Proc. Natl. Acad. Sci (USA), 93:1412-1417; Hahm et al., (1996) Virology, 226:318-326; Ito et al. (1996) J. Gen. Virol., 77:1043-1054; Mizutani et al. (1995) Biochem. Biophys. Res. Commun., 212:906-911; Cho et al. (1997) J. Virol. Meth. 65:201-207 and then extrapolated therefrom for dosages for humans.

[0615] The amount of a modified PH20 to be administered for the treatment of a disease or condition can be determined by standard clinical techniques. In addition, in vitro assays and animal models can be employed to help identify optimal dosage ranges. The precise dosage, which can be determined empirically, can depend on the particular enzyme, the route of administration, the type of disease to be treated and the seriousness of the disease.

[0616] Hence, it is understood that the precise dosage and duration of treatment is a function of the disease being treated and can be determined empirically using known testing protocols or by extrapolation from in vivo or in vitro test data. It is to be noted that concentrations and dosage values also can vary with the severity of the condition to be alleviated. It is to be further understood that for any particular subject, specific dosage regimens should be adjusted over time according to the individual need and the professional judgment of the person administering or supervising the administration of the compositions, and that the concentration ranges set forth herein are exemplary only and are not intended to limit the scope or use of compositions and combinations containing them. The compositions can be administered hourly, daily, weekly, monthly, yearly or once. Generally, dosage regimens are chosen to limit toxicity. It should be noted that the attending physician would know how to and when to terminate, interrupt or adjust therapy to lower dosage due to toxicity, or bone marrow, liver or kidney or other tissue dysfunctions. Conversely, the attending physician would also know how to and when to adjust treatment to higher levels if the clinical response is not adequate (precluding toxic side effects).

[0617] Typically, a therapeutically effective dose of a modified PH20 enzyme is at or about 10 Unit (U) to 500,000 Units, 100 Units to 100,000 Units, 500 Units to 50,000 Units, 1000 Units to 10,000 Units, 5000 Units to 7500 Units, 5000 Units to 50,000 Units, or 1,000 Units to 10,000 Units, generally 1,000 to 50,000 Units, in a stabilized solution or suspension or a lyophilized form. For example, a PH20 polypeptide, can be administered at a dose of at least or about at least or 10 U, 20 U, 30 U, 40 U, 50 U, 100 U, 150 U, 200 U, 250 U, 300 U, 350 U, 400 U, 450 U, 500 U, 600 U, 700 U, 800 U, 900 U, 1000 U, 2,000 U, 3,000 U, 4,000 U, 5,000 U or more. The formulations can be provided in unit-dose forms such as, but not limited to, ampoules, syringes and individually packaged tablets or capsules.

[0618] The PH20 enzyme can be administered alone, or with other pharmacologically effective agent(s) or therapeutic agent(s), in a total volume of 0.1-100 mL, 1-50 mL, 10-50 mL, 10-30 mL, 1-20 mL, or 1-10 mL, typically 10-50 mL. Typically, volumes of injections or infusions of a PH20-containing composition are at least or at least about 0.01 mL, 0.05 mL, 0.1 mL, 0.2 mL, 0.3 mL, 0.4 mL, 0.5 mL, 1 mL, 2 mL, 3 mL, 4 mL, 5 mL, 6 mL, 7 mL, 8 mL, 9 mL, 10 mL, 20 mL, 30 mL, 40 mL, 50 mL or more. The formulations provided herein contain a modified PH20 polypeptide in an amount between or about between 30 Units (U)/mL to 3000 U/mL, 300 U/mL to 2000 U/mL or 600 U/mL to 2000 U/mL or 600 U/mL to 1000 U/mL, such as at least or about at least 30 U/mL, 35 U/mL, 40 U/mL, 50 U/mL, 100 U/mL, 200 U/mL, 300 U/mL, 400 U/mL, 500 U/mL, 600 U/mL, 700 U/mL, 800 U/mL, 900 U/mL, 1000 U/mL, 2000 U/mL or 3000 U/mL. For example, the formulations provided herein contain a PH20 that is in an amount that is at least 100 U/mL to 1000 U/mL, for example at least or about at least or about or is 600 U/mL.

[0619] The PH20 polypeptide can be provided as a solution in an amount that is at least or about or is 100 U/mL, 150 U/mL, 200 U/mL, 300 U/mL, 400 U/mL, 500 U/mL, 600 U/mL, 800 U/mL or 1000 U/mL, or can be provided in a more concentrated form, for example in an amount that is at least or about or is 2000 U/mL, 3000 U/mL, 4000 U/mL, 5000 U/mL, 8000 U/mL, 10,000 U/mL or 20,000 U/mL for use directly or for dilution to the effective concentration prior to use. The PH20 polypeptide compositions can be provided as a liquid or lyophilized formulation.

[0620] When the PH20 is co-formulated with a therapeutic agent, dosages can be provided as a ratio of the amount of a PH20 polypeptide to the amount of therapeutic agent administered. For example, a PH20 polypeptide can be administered at 1 hyaluronidase U/therapeutic agent U (1:1) to 50:1 or more, for example, at or about 1:1, 2:1, 3:1, 4:1, 5:1, 6:1, 7:1, 8:1, 9:1, 10:1, 11:1, 12:1, 13:1, 14:1, 15:1, 20:1, 25:1, 30:1, 35:1, 40:1, 45:1, 50:1 or more.

[0621] The formulations provided herein, including co-formulations and/or stable formulations, can be prepared for single dose administration, multiple dose administration or continuous infusion administrations. Implantation of a slow-release or sustained-release system, such that a constant level of dosage is maintained (see e.g., U.S. Pat. No. 3,710,795), is also contemplated herein.

[0622] For example, formulations of pharmaceutically and therapeutically active compounds and derivatives thereof are provided for administration to humans and animals in unit dosage forms or multiple dosage forms. For example, compounds can be formulated as tablets, capsules, pills, powders, granules, sterile parenteral solutions or suspensions, oral solutions or suspensions, or oil-water emulsions containing suitable quantities of the compounds or pharmaceutically acceptable derivatives thereof. Each unit dose contains a predetermined quantity of therapeutically active compound(s) sufficient to produce the desired therapeutic effect, in association with the required pharmaceutical carrier, vehicle or diluent. Examples of unit dose forms include ampoules and syringes and individually packaged tablets or capsules. Unit dose forms can be administered in fractions or multiples thereof. A multiple dose form is a plurality of identical unit dosage forms packaged in a single container to be administered in segregated unit dose forms. Examples of multiple dose forms include vials, bottles of tablets or capsules or bottles of pints or gallons. Hence, multiple dose form is a multiple of unit doses that are not segregated in packaging. Generally, dosage forms or compositions containing active ingredient in the range of 0.005% to 100% with the balance made up from non-toxic carrier can be prepared.

[0623] Compositions provided herein typically are formulated for administration by subcutaneous route, although other routes of administration are contemplated, such as any route known to those of skill in the art including intramuscular, intraperitoneal, intravenous, intradermal, intralesional, intraperitoneal injection, epidural, vaginal, rectal, local, otic, transdermal administration or any route of administration. Formulations suited for such routes are known to one of skill in the art. Administration can be local, topical or systemic depending upon the locus of treatment. Local administration to an area in need of treatment can be achieved by, for example, but not limited to, local infusion during surgery, topical application, e.g., in conjunction with a wound dressing after surgery, by injection, by means of a catheter, by means of a suppository, or by means of an implant. Compositions also can be administered with other biologically active agents, either sequentially, intermittently or in the same composition.

[0624] The most suitable route in any given case depends on a variety of factors, such as the nature of the disease, the tolerance of the subject to a particular administration route, the severity of the disease, and the particular composition that is used. Typically, the compositions provided herein are administered parenterally. In some examples, modified PH20 polypeptide compositions are administered so that they reach the interstitium of skin or tissues, thereby degrading the interstitial space for subsequent delivery of a therapeutic agent. Thus, in some examples, direct administration under the skin, such as by subcutaneous administration methods, is contemplated. Thus, in one example, local administration can be achieved by injection, such as from a syringe or other article of manufacture containing an injection device such as a needle. In another example, local administration can be achieved by infusion, which can be facilitated by the use of a pump or other similar device. Other modes of administration also are contemplated. For example, modified PH20 polypeptides, included conjugated forms with increased half-life such as PEGylated forms thereof, can be administered intravenously. Pharmaceutical compositions can be formulated in dosage forms appropriate for each route of administration.

[0625] Administration methods can be employed to decrease the exposure of selected modified PH20 polypeptides to degradative processes, such as proteolytic degradation and immunological intervention via antigenic and immunogenic responses. Examples of such methods include local administration at the site of treatment. PEGylation of therapeutics increases resistance to proteolysis, increases plasma half-life, and decreases antigenicity and immunogenicity. Examples of PEGylation methodologies are known in the art (see for example, Lu and Felix, Int. J. Peptide Protein Res., 43: 127-138, 1994; Lu and Felix, Peptide Res., 6: 140-6, 1993; Felix et al., Int. J. Peptide Res., 46: 253-64, 1995; Benhar et al., J. Biol. Chem., 269: 13398-404, 1994; Brumeanu et al., J Immunol, 154: 3088-95, 1995; see also, Caliceti et al. (2003) Adv. Drug Deliv. Rev. 55(10):1261-77 and Molineux (2003) Pharmacotherapy 23 (8 Pt 2):3S-8S). PEGylation also can be used in the delivery of nucleic acid molecules in vivo. For example, PEGylation of adenovirus can increase stability and gene transfer (see, e.g., Cheng et al. (2003) Pharm. Res. 20(9): 1444-51).

[0626] Various other delivery systems are known and can be used to administer selected PH20 polypeptides, such as but not limited to, encapsulation in liposomes, microparticles, microcapsules, recombinant cells capable of expressing the compound, receptor mediated endocytosis, and delivery of nucleic acid molecules encoding selected PH20 polypeptides such as retrovirus delivery systems.

[0627] Hence, in certain embodiments, liposomes and/or nanoparticles also can be employed with administration of soluble PH20 polypeptides. Liposomes are formed from phospholipids that are dispersed in an aqueous medium and spontaneously form multilamellar concentric bilayer vesicles (also termed multilamellar vesicles (MLVs)). MLVs generally have diameters of from 25 nm to 4 μm. Sonication of MLVs results in the formation of small unilamellar vesicles (SUVs) with diameters in the range of 200 to 500 angstroms containing an aqueous solution in the core.

[0628] Phospholipids can form a variety of structures other than liposomes when dispersed in water, depending on the molar ratio of lipid to water. At low ratios of lipid to water, liposomes form. Physical characteristics of liposomes depend on the pH, ionic strength and the presence of divalent cations. Liposomes can show low permeability to ionic and polar substances, but at elevated temperatures undergo a phase transition which markedly alters their permeability. The phase transition involves a change from a closely packed, ordered structure, known as the gel state, to a loosely packed, less-ordered structure, known as the fluid state. This occurs at a characteristic phase-transition temperature and results in an increase in permeability to ions, sugars and drugs.

[0629] Liposomes interact with cells via different mechanisms: endocytosis by phagocytic cells of the reticuloendothelial system such as macrophages and neutrophils; adsorption to the cell surface, either by nonspecific weak hydrophobic or electrostatic forces, or by specific interactions with cell-surface components; fusion with the plasma cell membrane by insertion of the lipid bilayer of the liposome into the plasma membrane, with simultaneous release of liposomal contents into the cytoplasm; and by transfer of liposomal lipids to cellular or subcellular membranes, or vice versa, without any association of the liposome contents. Varying the liposome formulation can alter which mechanism is operative, although more than one can operate at the same time. Nanocapsules can generally entrap compounds in a stable and reproducible way. To avoid side effects due to intracellular polymeric overloading, such ultrafine particles (sized around 0.1 μm) should be designed using polymers able to be degraded in vivo. Biodegradable polyalkyl-cyanoacrylate nanoparticles that meet these requirements are contemplated for use herein, and such particles can be easily made.

[0630] 4. Combinations and Co-Formulations with Therapeutic Agents

[0631] Pharmaceutical compositions containing a modified PH20 polypeptide can be co-administered with another therapeutic agent. In such examples, the modified PH20 polypeptides can be formulated separately as a pharmaceutical composition and administered prior to, simultaneously with, intermittently with, or subsequent to a second composition containing an active therapeutic agent. In other examples, modified PH20 polypeptides can be co-formulated with pharmaceutical formulations of other therapeutic agents.

[0632] In particular, provided herein are co-formulations containing a modified PH20 polypeptide as described herein and a therapeutic agent that is a chemotherapeutic agent, an analgesic agent, an anti-inflammatory agent, an antimicrobial agent, an amoebicidal agent, a trichomonacidal agent, an anti-Parkinson agent, an anti-malarial agent, an anticonvulsant agent, an anti-depressant agent, and antiarthritics agent, an anti-fungal agent, an antihypertensive agent, an antipyretic agent, an anti-parasite agent, an antihistamine agent, an alpha-adrenergic agonist agent, an alpha blocker agent, an anesthetic agent, a bronchial dilator agent, a biocide agent, a bactericide agent, a bacteriostat agent, a beta adrenergic blocker agent, a calcium channel blocker agent, a cardiovascular drug agent, a contraceptive agent, a decongestant agent, a diuretic agent, a depressant agent, a diagnostic agent, an electrolyte agent, a hypnotic agent, a hormone agent, a hyperglycemic agent, a muscle relaxant agent, a muscle contractant agent, an ophthalmic agent, a parasympathomimetic agent, a psychic energizer agent, a sedative agent, a sympathomimetic agent, a tranquilizer agent, a urinary agent, a vaginal agent, a viricide agent, a vitamin agent, a non-steroidal anti-inflammatory agent, an angiotensin converting enzyme inhibitor agent, a polypeptide, a protein, a nucleic acid, a drug, an organic molecule or a sleep inducer. For example, modified PH20 polypeptides provided herein can be co-formulated with an antibody such as a monoclonal antibody, an Immune Globulin, an antibiotic, a bisphosphonate, a cytokine, a chemotherapeutic agent, a coagulation factor or an insulin. Exemplary therapeutic agents that can be co-formulated with a modified PH20 polypeptide are described in described in Section H.

[0633] 5. Packaging, Articles of Manufacture and Kits

[0634] Pharmaceutical compounds of modified PH20 polypeptides, or nucleic acids encoding such polypeptides, or derivatives or variants thereof can be packaged as articles of manufacture containing packaging material, a pharmaceutical composition which is effective for treating a disease or disorder, and a label that indicates that the pharmaceutical composition or therapeutic molecule is to be used for treating the disease or disorder. Combinations of a selected modified PH20 polypeptide, or a derivative or variant thereof and an therapeutic agent also can be packaged in an article of manufacture. Typically, the modified PH20 polypeptides are packaged as systems for the non-refrigerated storage of the pharmaceutical compositions.

[0635] The articles of manufacture provided herein contain packaging materials. Packaging materials for use in packaging pharmaceutical products are well known to those of skill in the art. See, for example, U.S. Pat. Nos. 5,323,907, 5,052,558 and 5,033,252, each of which is incorporated herein in its entirety. Examples of pharmaceutical packaging materials include, but are not limited to, blister packs, bottles, tubes, inhalers, pumps, bags, vials, containers, syringes, bottles, and any packaging material suitable for a selected formulation and intended mode of administration and treatment. In particular, the container or other material is generally one that is suitable for storage without refrigeration, for example, is a syringe, tube, bottle, bag or vial. The articles of manufacture can include a needle or other injection device so as to facilitate administration (e.g., sub-epidermal administration) for local injection purposes. The choice of package depends on the PH20 and/or therapeutic agent, and whether such compositions will be packaged together or separately. In one example, the PH20 can be packaged as a mixture with the therapeutic agent. In another example, the components can be packaged as separate compositions

[0636] Modified PH20 polypeptides, therapeutic agents and/or articles of manufacture thereof also can be provided as kits. Kits can include a pharmaceutical composition described herein and an item for administration provided as an article of manufacture. For example a PH20 polypeptide can be supplied with a device for administration, such as a syringe, an inhaler, a dosage cup, a dropper, or an applicator. The compositions can be contained in the item for administration or can be provided separately to be added later. The kit can, optionally, include instructions for application including dosages, dosing regimens and instructions for modes of administration. Kits also can include a pharmaceutical composition described herein and an item for diagnosis. For example, such kits can include an item for measuring the concentration, amount or activity of the selected protease in a subject.

### G. METHODS OF ASSESSING PH20 ACTIVITY AND STABILITY

[0637] Assays can be used to assess the stability and activity of the PH20 polypeptides provided herein. The assays can be used to assess the hyaluronidase activity of the PH20 polypeptide under thermal stress conditions, including under various temperatures and/or over time. Other assays to assess stability also can be employed, such as assays to assess solubility, formation of aggregates, crystallization, oxidation and others within the knowledge of a skilled person.

[0638] 1. Hyaluronidase Activity

[0639] The activity of a modified PH20 polypeptide can be assessed using methods well known in the art. For example, the USP XXII assay for hyaluronidase determines activity indirectly by measuring the amount of undegraded hyaluronic acid, or hyaluronan, (HA) substrate remaining after the enzyme is allowed to react with the HA for 30 min at 37° C. (USP XXII-NF XVII (1990) 644-645 United States Pharmacopeia Convention, Inc, Rockville, Md.). A Hyaluronidase Reference Standard (USP) or National Formulary (NF) Standard Hyaluronidase solution can be used in an assay to ascertain the activity, in units, of any hyaluronidase. In one example, activity is measured using a microturbidity assay. This is based on the formation of an insoluble precipitate when hyaluronic acid binds with a reagent that precipitates it, such as acidified serum or cetylpyridinium chloride (CPC). The activity is measured by incubating hyaluronidase with sodium hyaluronate (hyaluronic acid) for a set period of time (e.g., 10 minutes) and then precipitating the undigested sodium hyaluronate with the addition of acidified serum or CPC. The turbidity of the resulting sample is measured at 640 nm after an additional development period. The decrease in turbidity resulting from hyaluronidase activity on the sodium hyaluronate substrate is a measure of hyaluronidase enzymatic activity.

[0640] In another example, hyaluronidase activity is measured using a microtiter assay in which residual biotinylated hyaluronic acid is measured following incubation with hyaluronidase (see e.g., Frost and Stern (1997) Anal. Biochem. 251:263-269, U.S. Pat. Publication No. 20050260186). The free carboxyl groups on the glucuronic acid residues of hyaluronic acid are biotinylated, and the biotinylated hyaluronic acid substrate is covalently coupled to a microtiter plate. Following incubation with hyaluronidase, the residual biotinylated hyaluronic acid substrate is detected using an avidin-peroxidase reaction, and compared to that obtained following reaction with hyaluronidase standards of known activity.

[0641] Other assays to measure hyaluronidase activity also are known in the art and can be used in the methods herein (see e.g., Delpech et al., (1995) Anal. Biochem. 229:35-41; Takahashi et al., (2003) Anal. Biochem. 322:257-263).

[0642] Many hyaluronidase assays have been based upon the measurement of the generation of new reducing N-acetylamino groups (Bonner and Cantey, Clin. Chim Acta 13:746-752, 1966), or loss of viscosity (De Salegui et al., Arch. Biochem. Biophys. 121:548-554, 1967) or turbidity (Dorfman and Ott, J. Biol. Chem. 172:367, 1948). With purified substrates all of these methods suffice for determination of the presence or absence of endoglycosidase activity.

[0643] Substantially purified glycosaminoglycan substrates can also be used in a Gel Shift Assay. Glycosaminoglycans are mixed with recombinant PH20, such as a soluble PH20, to test for endoglycosidase activity that results in a shift in substrate mobility within the gel. Examples of such substrates include, but are not limited to, chondroitin-4 and 6 sulfate, dermatan sulfate, heparan-sulfate, which can be obtained from Sigma Chemical. Human umbilical cord Hyaluronan can be obtained from ICN. For example, each test substrate can be diluted to at or about 0.1 mg/mL in a buffer range from pH 3.5-7.5. In such an exemplary assay, at or about 10 μl samples of purified soluble PH20 or conditioned media from PH20 expressing cells can be mixed with at or about 90 μl of test substrate in desired buffer and incubated for 3 hours at 37° C. Following incubation, samples are neutralized with sample buffer (Tris EDTA pH 8.0, Bromophenol Blue and glycerol) followed by electrophoresis. Glycosaminoglycans can be detected using any method known in the art, for example, glycosaminoglycans can be detected by staining the gels using 0.5% Alcian Blue in 3% Glacial Acetic Acid overnight followed by destaining in 7% Glacial Acetic Acid. Degradation is determined by comparison of substrate mobility in the presence and absence of enzyme.

[0644] Hyaluronidase activity can also be detected by substrate gel zymography (Guentenhoner et al. (1992) Matrix 12:388-396). In this assay, a sample is applied to an SDS-PAGE gel containing hyaluronic acid and the proteins in the sample separated by electrophoresis. The gel is then incubated in an enzyme assay buffer and subsequently stained to detect the hyaluronic acid in the gel. Hyaluronidase activity is visualized as a cleared zone in the substrate gel.

[0645] The ability of a PH20 polypeptide, including a modified PH20 polypeptide provided herein, to act as a spreading or diffusing agent also can be assessed. For example, trypan blue dye can be injected subcutaneously with or without a PH20 polypeptide into the lateral skin on each side of nude mice. The dye area is then measured, such as with a microcaliper, to determine the ability of the PH20 polypeptide to act as a spreading agent (U.S. Pat. Pub. No. 20060104968).

[0646] The functional activity of a PH20 polypeptide can be compared and/or normalized to a reference standard using any of these assays. This can be done to determine what a functionally equivalent amount of a PH20 polypeptide is. For example, the ability of a PH20 polypeptide to act as a spreading or diffusing agent can be assessed by injecting it into the lateral skin of mice with trypan blue, and the amount required to achieve the same amount of diffusion as, for example, 100 units of a Hyaluronidase Reference Standard, can be determined. The amount of PH20 polypeptide required is, therefore, functionally equivalent to 100 hyaluronidase units.

[0647] 2. Thermal Stability

[0648] The stability of a protein can be determined by measuring the activity of the protein as a function of time. The unfolding temperature (Tm) of the protein can be used as a marker of solution stability and in vivo stability for proteins. The unfolding temperature of a particular protein refers to that temperature at which the protein loses its secondary structure and typically, its activity and can be determined using methods known to those of skill in the art, such as differential scanning calorimetry.

[0649] For example, thermal stability can be analyzed using a number of non-limiting biophysical or biochemical techniques known in the art. In particular examples, thermal stability is evaluated by analytical spectroscopy. An exemplary analytical spectroscopy method is Differential Scanning calorimetry (DSC). DSC employs a calorimeter which is sensitive to the heat absorbances that accompany the unfolding of most proteins or protein domains (see, e.g. Sanchez-Ruiz, et al., Biochemistry, 27: 1648-52, 1988). To determine the thermal stability of a protein, a sample of the protein is inserted into the calorimeter and the temperature is raised until the protein unfolds. The temperature at which the protein unfolds is indicative of overall protein stability.

[0650] Another exemplary analytical spectroscopy method is Circular Dichroism (CD) spectroscopy. CD spectrometry measures the optical activity of a composition as a function of increasing temperature. Circular dichroism (CD) spectroscopy measures differences in the absorption of left-handed polarized light versus right-handed polarized light which arise due to structural asymmetry. A disordered or unfolded structure results in a CD spectrum very different from that of an ordered or folded structure. The CD spectrum reflects the sensitivity of the proteins to the denaturing effects of increasing temperature and is therefore indicative of a protein's thermal stability (see van Mierlo and Steemsma, J. Biotechnol., 79(3):281-98, 2000).

[0651] Another exemplary analytical spectroscopy method for measuring thermal stability is Fluorescence Emission Spectroscopy (see van Mierlo and Steemsma, supra). Yet another exemplary analytical spectroscopy method for measuring thermal stability is Nuclear Magnetic Resonance (NMR) spectroscopy (see, e.g. van Mierlo and Steemsma, supra).

[0652] In certain embodiments, thermal stability is evaluated by measuring the melting temperature (Tm) of a polypeptide composition using any of the above techniques (e.g. analytical spectroscopy techniques). The melting temperature is the temperature at the midpoint of a thermal transition curve wherein 50% of molecules of a composition are in a folded state. In one example, the melting temperature of a PH20 polypeptide, such as a modified PH20 polypeptide, can be determined by measuring the hydrodynamic radius of particles by dynamic light scattering under various conditions (e.g., various temperatures over time). An increase in particle size and a decrease in the melting temperature indicates denaturation and subsequent aggregation of the hyaluronidase.

[0653] In other embodiments, the thermal stability can be measured biochemically. An exemplary biochemical method for assessing thermal stability is a thermal challenge assay. In a “thermal challenge assay,” a polypeptide is subjected to a range of elevated temperatures for a set period of time. For example, in one embodiment, test polypeptides are subject to a range of increasing temperatures, e.g., for 10 minutes. The activity of the protein is then assayed by a relevant biochemical assay (e.g. hyaluronidase assay). The thermal challenge assay can be used to determine the temperature at which 50% hyaluronidase activity is retained (i.e. the T_{C} value or T₅₀). The Tc or T₅₀ values are not necessarily equivalent to the biophysically derived Tₘ values. Such an assay can be done in a high-throughput format. For example, a library of modified hyaluronan-degrading enzymes (e.g. modified PH20 polypeptides) can be created using methods known in the art. The modified polypeptide(s) can be subjected to thermal challenge. The challenged test samples can be assayed for hyaluronidase activity and those that are stable can be scaled up and further characterized.

[0654] 3. Other Assays to Assess Stability

[0655] The stability of a PH20 polypeptide provided herein also can be assessed using other methods and assays known in the art, such as assays that assess purity, recovery, crystallization or aggregation. For example, in addition to assessing stability based on hyaluronidase activity, stability can be assessed by visual inspection, percent recovery, protein purity and apparent melting temperature.

[0656] For example, protein purity can be measured by reversed phase high performance liquid chromatography (RP-HPLC). Protein purity, as determined by RP-HPLC, is the percent of the main PH20 protein peak present, as compared to all of the protein species present. Thus, RP-HPLC, and similar methods known to one of skill in the art, can assess degradation of the enzyme. Protein purity can be assessed over time. Percent recovery also can be determined as the relative percentage of the polypeptide under the thermal stress condition (e.g. 52° C. for 10 minutes) as compared to a reference sample or the same polypeptide under thermal neutral conditions (e.g. 4° C. for 10 minutes). PH20 polypeptide stability also can be determined by measuring the oxidation of the hyaluronidase by RP-HPLC. Percent oxidation is a measure of sum of the peak areas of the major (ox-1) and minor (ox-2) peaks.

[0657] Other methods known to one of skill in the art that can be used to determine the stability of the hyaluronidase in the co-formulations provided herein, include polyacrylamide gel electrophoresis (PAGE), immunoblotting, nuclear magnetic resonance (NMR) spectroscopy, mass spectrometry, circular dichroism (CD) and dye-based fluorescence assays.

[0658] 4. Solubility

[0659] The solubility of a PH20 polypeptide can be determined by any method known to one of the skill in the art. One method for determining solubility is detergent partitioning. For example, a soluble PH20 polypeptide can be distinguished, for example, by its partitioning into the aqueous phase of a Triton® X-114 solution at 37° C. (Bordier et al., (1981) J. Biol. Chem., 256:1604-1607). Membrane-anchored polypeptides, such as lipid-anchored hyaluronidases, including GPI-anchored hyaluronidases, will partition into the detergent-rich phase, but will partition into the detergent-poor or aqueous phase following treatment with Phospholipase C. Phospholipase C is an enzyme that cleaves the phospho-glycerol bond found in GPI-anchored proteins. Treatment with PLC will cause release of GPI-linked proteins from the outer cell membrane.

[0660] 5. Pharmacodynamics/Pharmacokinetics

[0661] The pharmacokinetic and pharmacodynamic properties of a PH20 polypeptide, such as a modified PH20 polypeptide, alone or in combination with another therapeutic agent, also can be assessed in vivo using animal models and/or human subjects, such as in the setting of a clinical trial. Pharmacokinetic or pharmacodynamic studies can be performed using animal models or can be performed during studies with patients administered with a PH20 polypeptide or modified PH20 polypeptide.

[0662] Animal models include, but are not limited to, mice, rats, rabbits, dogs, guinea pigs and non-human primate models, such as cynomolgus monkeys or rhesus macaques. In some instances, pharmacokinetic or pharmacodynamic studies are performed using healthy animals. In other examples, the studies are performed using animal models of a disease for which therapy with hyaluronan is considered, such as animal models of any hyaluronan-associated disease or disorder, for example a tumor model.

[0663] The pharmacokinetic properties of a PH20 polypeptide, such as a modified PH20 polypeptide, can be assessed by measuring such parameters as the maximum (peak) concentration (Cₘₐₓ), the peak time (i.e., when maximum concentration occurs; Tₘₐₓ), the minimum concentration (i.e., the minimum concentration between doses; Cₘᵢₙ), the elimination half-life (T_{1/2}) and area under the curve (i.e., the area under the curve generated by plotting time versus concentration; AUC), following administration. The absolute bioavailability of the hyaluronidase can be determined by comparing the area under the curve of hyaluronidase following subcutaneous delivery (AUC_{sc}) with the AUC of hyaluronidase following intravenous delivery (AUCᵢᵥ). Absolute bioavailability (F), can be calculated using the formula: F=([AUC]_{sc}×dose_{sc})/([AUC]ᵢᵥ×doseᵢᵥ). A range of doses and different dosing frequency of dosing can be administered in the pharmacokinetic studies to assess the effect of increasing or decreasing concentrations enzyme, such as modified PH20 polypeptide, in the dose.

### H. METHODS OF TREATMENT AND COMBINATION THERAPY

[0664] Provided herein are methods and uses of any of the modified PH20 polypeptides provided herein that exhibit hyaluronidase activity based on its ability to degrade glycosaminoglycan(s) such as hyaluronan. Due to such activity, the modified PH20 polypeptides can be used as a spreading factor to increase the delivery and/or bioavailability of subcutaneously administered therapeutic agents. Delivery of any therapeutic agent, including but not limited to, peptides, proteins, small molecule drugs, nucleic acids, or viruses can be facilitated or enhanced by co-administration with a modified PH20 polypeptide provided herein. For example, modified PH20 polypeptides can be used to increase the delivery of therapeutic agents such as antibodies (e.g., monoclonal antibodies), cytokines, Immune Globulin, an Insulin, or coagulation factors, to a desired locus, such as by increasing penetration of chemotherapeutic agents into solid tumors. The modified PH20 polypeptides also can be used to treat a hyaluronan-disease or disorder that is characterized by an excess or accumulation of hyaluronan. For example, modified PH20 polypeptides provided herein can be used to for treating a tumor; for treating glycosaminoglycan accumulation in the brain; for treating a cardiovascular disorder; for treating an ophthalmic disorder; for treating pulmonary disease; for treating cellulite; and/or for treating a proliferative disorder.

[0665] Other methods and uses of a modified PH20 polypeptide include any that are known to one of skill in the art. For example, various forms of PH20 hyaluronidases have been prepared and approved for therapeutic use in humans. For example, animal-derived hyaluronidase preparations include Vitrase® (ISTA Pharmaceuticals), a purified ovine testicular hyaluronidase, and Amphadase® (Amphastar Pharmaceuticals), a bovine testicular hyaluronidase. Hylenex® (Halozyme Therapeutics) is a human recombinant hyaluronidase produced by genetically engineered Chinese Hamster Ovary (CHO) cells containing nucleic acid encoding for soluble rHuPH20 (see e.g., U.S. Pat. No. 7,767,429). Approved therapeutic uses for hyaluronidases include use as an adjuvant to increase the absorption and dispersion of other therapeutic agents for hypodermoclysis (subcutaneous fluid administration), and as an adjunct in subcutaneous urography for improving resorption of radiopaque agents. In addition to these indications, hyaluronidases can be used as a therapeutic or cosmetic agent for the treatment of additional diseases and conditions. For example, hyaluronidase is commonly used, for example, for peribulbar block in local anesthesia prior ophthalmic surgery. The presence of the enzyme prevents the need for additional blocks and reduces the time to the onset of akinesia (loss of eye movement). Peribulbar and sub-Tenon's block are the most common applications of hyaluronidase for ophthalmic procedures. Hyaluronidase also can promote akinesia in cosmetic surgery, such as blepharoplasties and face lifts. It is understood that modified PH20 hyaluronidases provided herein can be used in any method of treatment or combination therapy for which a PH20 hyaluronidase is used (see e.g., U.S. Publication Nos. US20040268425; US20050260186; US20060104968; and U.S. application Ser. No. 12/381,844, published as U.S. Publication No. US20100074885; Ser. No. 12/386,249, published as U.S. Publication No. US20090311237; Ser. No. 12/387,225, published as U.S. Publication No. US20090304665; and Ser. No. 12/386,222, published as U.S. Publication No. US2010003238, each incorporated by reference in their entirety).

[0666] Exemplary, non-limiting, methods and uses are described in the following subsections.

[0667] 1. Methods of Delivering Therapeutic Agents

[0668] As noted above, hyaluronidase is a spreading or diffusing substance that modifies the permeability of connective tissue through the hydrolysis of hyaluronic acid, a polysaccharide found in the intercellular ground substance of connective tissue, and of certain specialized tissues, such as the umbilical cord and vitreous humor. When no spreading factor is present, materials injected subcutaneously, such as drugs, proteins, peptides and nucleic acid, spread very slowly. Co-injection with hyaluronidase, however, can cause rapid spreading. The rate of diffusion is proportional to the amount of enzyme, and the extent of diffusion is proportional to the volume of solution.

[0669] Any modified PH20 polypeptides provided herein can be used to promote or enhance the delivery agents and molecules to any of a variety of mammalian tissues in vivo. It can be used to facilitate the diffusion and, therefore, promote the delivery, of small molecule pharmacologic agents as well as larger molecule pharmacologic agents, such as proteins, nucleic acids and ribonucleic acids, and macromolecular compositions than can contain a combination of components including, but not limited to, nucleic acids, proteins, carbohydrates, lipids, lipid-based molecules and drugs (see e.g., U.S. Publication Nos. US20040268425; US20050260186; and US20060104968). Any of the modified PH20 polypeptides can be co-administered and/or co-formulated with a therapeutic agent to improve the bioavailability as well as pharmacokinetic (PK) and/or pharmacodynamic (PD) characteristics of the co-formulated or co-administered agent. PK/PD parameters that can be improved by using co-administering a therapeutic agent with a soluble PH20, such as a modified PH20 provided herein, include such measures as Cₘₐₓ (the maximal concentration of agent achieved following absorption in, e.g., the bloodstream), Tₘₐₓ (the time required to achieve maximal concentration), T_{1/2} (the time required for the concentration to fall by half), Cₘᵢₙ (the minimal concentration of agent following metabolism and excretion), AUC (area under the curve of concentration versus time, a measure of the overall amount of bioavailability), concentrations in various tissues of interest (including, e.g., the rate of achieving desired concentrations, the overall levels, and the duration of maintaining desired levels), and Eₘₐₓ (the maximal effect achieved).

[0670] Thus, the methods of treatment provided herein include combination therapies in which any of the modified PH20 polypeptides are co-administered with a therapeutic agent for the treatment of a disease or disorder for which the therapeutic agent treats. Any therapeutic agent that ameliorates and or otherwise lessens the severity of a disease or condition can be combined with a modified PH20 polypeptide provided herein in order to increase the bioavailability of such therapeutic agent. In particular, modified PH20 polypeptides provided herein can be used in each and all of the combinations described in applications see e.g., U.S. Publication Nos. US20040268425; US20050260186; US20060104968 and U.S. application Ser. No. 12/381,844, published as U.S. Publication No. US20100074885; Ser. No. 12/386,249, published as U.S. Publication No. US20090311237; Ser. No. 12/387,225, published as U.S. Publication No. US20090304665; and Ser. No. 12/386,222, published as U.S. Publication No. US2010003238 in place of the disclosed hyaluronidase or hyaluronidase degrading enzyme.

[0671] Modified PH20 polypeptides can be administered prior to, subsequent to, intermittently with or simultaneously with the therapeutic agent preparation. Generally, the modified PH20 polypeptide is administered prior to or simultaneously with administration of the therapeutic agent preparation to permit the PH20 to degrade the hyaluronic acid in the interstitial space. The PH20 can be administered at a site different from the site of administration of the therapeutic molecule or the soluble PH20 can be administered at a site the same as the site of administration of the therapeutic molecule.

[0672] Examples of pharmaceutical, therapeutic and cosmetic agents and molecules that can be administered with hyaluronidase include, but are not limited to, a chemotherapeutic or anticancer agent, an analgesic agent, an antibiotic agent, an anti-inflammatory agent, an antimicrobial agent, an amoebicidal agent, a trichomonacidal agent, an anti-Parkinson agent, an anti-malarial agent, an anticonvulsant agent, an anti-depressant agent, an anti-arthritic agent, an anti-fungal agent, an antihypertensive agent, an antipyretic agent, an anti-parasitic agent, an antihistamine agent, an alpha-adrenergic agonist agent, an alpha blocker agent, an anesthetic agent, a bronchial dilator agent, a biocide agent, a bactericide agent, a bacteriostatic agent, a beta adrenergic blocker agent, a calcium channel blocker agent, a cardiovascular drug agent, a contraceptive agent, a cosmetic or esthetic agent, a decongestant agent, a diuretic agent, a depressant agent, a diagnostic agent, an electrolyte agent, a hypnotic agent, a hormone agent, a hyperglycemic agent, a muscle relaxant agent, a muscle contractant agent, an ophthalmic agent, a parasympathomimetic agent, a psychic energizer agent, a sedative agent, a sleep inducer, a sympathomimetic agent, a tranquilizer agent, a urinary agent, a vaginal agent, a viricide agent, a vitamin agent, a non-steroidal anti-inflammatory agent, or an angiotensin converting enzyme inhibitor agent, and any combination thereof. In particular, therapeutic agents include antibodies, including monoclonal antibodies, bisphosphonates, insulins, coagulation factors, cytokines and Immune Globulins.

[0673] For example, modified PH20 polypeptides provided herein can be used to increase the delivery of chemotherapeutic agents. Hyaluronidases have also been used to enhance the activity of chemotherapeutics and/or the accessibility of tumors to chemotherapeutics (Schuller et al., 1991, Proc. Amer. Assoc. Cancer Res. 32:173, abstract no. 1034; Czejka et al., 1990, Pharmazie 45:H.9; Baumgartner et al. (1988) Reg. Cancer Treat. 1:55-58; Zanker et al. (1986) Proc. Amer. Assoc. Cancer Res. 27:390). Combination chemotherapy with hyaluronidase is effective in the treatment of a variety of cancers including urinary bladder cancer (Horn et al., 1985, J Surg. Oncol. 28:304-307), squamous cell carcinoma (Kohno et al., 94, J. Cancer Res. Oncol. 120:293-297), breast cancer (Beckenlehner et al., 1992, J. Cancer Res. Oncol. 118:591-596), and gastrointestinal cancer (Scheithauer et al., 1988, Anticancer Res. 8:391-396), prostate cancer, pancreatic cancer and other cancers. In this example, the modified PH20 hyaluronidase enhances penetration of chemotherapeutic or other anti-cancer agents into solid tumors, thereby treating the disease.

[0674] Compositions containing soluble PH20 can be injected intratumorally with anti-cancer agents or intravenously for disseminated cancers or hard to reach tumors. The anticancer agent can be a chemotherapeutic, an antibody, a peptide, or a gene therapy vector, virus or DNA. Additionally, hyaluronidase can be used to recruit tumor cells into the cycling pool for sensitization in previously chemorefractory tumors that have acquired multiple drug resistance (St Croix et al., (1998) Cancer Lett September 131(1): 35-44).

[0675] Exemplary anti-cancer agents that can be administered after, coincident with or before administration of a modified PH20 polypeptide provided herein, include, but are not limited to Acivicins; Aclarubicins; Acodazoles; Acronines; Adozelesins; Aldesleukins; Alemtuzumabs; Alitretinoins (9-Cis-Retinoic Acids); Allopurinols; Altretamines; Alvocidibs; Ambazones; Ambomycins; Ametantrones; Amifostines; Aminoglutethimides; Amsacrines; Anastrozoles; Anaxirones; Ancitabines; Anthramycins; Apaziquones; Argimesnas; Arsenic Trioxides; Asparaginases; Asperlins; Atrimustines; Azacitidines; Azetepas; Azotomycins; Banoxantrones; Batabulins; Batimastats; BCG Live; Benaxibines; Bendamustines; Benzodepas; Bexarotenes; Bevacizumab; Bicalutamides; Bietaserpines; Biricodars; Bisantrenes; Bisnafide Dimesylates; Bizelesins; Bleomycins; Bortezomibs; Brequinars; Bropirimines; Budotitanes; Busulfans; Cactinomycins; Calusterones; Canertinibs; Capecitabines; Caracemides; Carbetimers; Carboplatins; Carboquones; Carmofurs; Carmustines with Polifeprosans; Carmustines; Carubicins; Carzelesins; Cedefingols; Celecoxibs; Cemadotins; Chlorambucils; Cioteronels; Ciplactin; Cirolemycins; Cisplatins; Cladribines; Clanfenurs; Clofarabines; Crisnatols; Cyclophosphamides; Cytarabine liposomals; Cytarabines; Dacarbazines; Dactinomycins; Darbepoetin Alfas; Daunorubicin liposomals; Daunorubicins/Daunomycins; Daunorubicins; Decitabines; Denileukin Diftitoxes; Dexniguldipines; Dexonas; Dexrazoxanes; Dezaguanines; Diaziquones; Dibrospidiums; Dienogests; Dinalins; Disermolides; Docetaxels; Dofequidars; Doxifluridines; Doxorubicin liposomals; Doxorubicin HCl; Doxorubicin HCl liposome injection; Doxorubicins; Droloxifenes; Dromostanolone Propionates; Duazomycins; Ecomustines; Edatrexates; Edotecarins; Eflornithines; Elacridars; Elinafides; Elliott's B Solutions; Elsamitrucins; Emitefurs; Enloplatins; Enpromates; Enzastaurins; Epipropidines; Epirubicins; Epoetin alfas; Eptaloprosts; Erbulozoles; Esorubicins; Estramustines; Etanidazoles; Etoglucids; Etoposide phosphates; Etoposide VP-16s; Etoposides; Etoprines; Exemestanes; Exisulinds; Fadrozoles; Fazarabines; Fenretinides; Filgrastims; Floxuridines; Fludarabines; Fluorouracils; 5-fluorouracils; Fluoxymesterones; Flurocitabines; Fosquidones; Fostriecins; Fostriecins; Fotretamines; Fulvestrants; Galarubicins; Galocitabines; Gemcitabines; Gemtuzumabs/Ozogamicins; Geroquinols; Gimatecans; Gimeracils; Gloxazones; Glufosfamides; Goserelin acetates; Hydroxyureas; Ibritumomabs/Tiuxetans; Idarubicins; Ifosfamides; Ilmofosines; Ilomastats; Imatinib mesylates; Imexons; Improsulfans; Indisulams; Inproquones; Interferon alfa-2as; Interferon alfa-2bs; Interferon Alfas; Interferon Betas; Interferon Gammas; Interferons; Interleukin-2s and other Interleukins (including recombinant Interleukins); Intoplicines; Iobenguanes [131-I]; Iproplatins; Irinotecans; Irsogladines; Ixabepilones; Ketotrexates; L-Alanosines; Lanreotides; Lapatinibs; Ledoxantrones; Letrozoles; Leucovorins; Leuprolides; Leuprorelins (Leuprolides); Levamisoles; Lexacalcitols; Liarozoles; Lobaplatins; Lometrexols; Lomustines/CCNUs; Lomustines; Lonafarnibs; Losoxantrones; Lurtotecans; Mafosfamides; Mannosulfans; Marimastats; Masoprocols; Maytansines; Mechlorethamines; Mechlorethamines/Nitrogen mustards; Megestrol acetates; Megestrols; Melengestrols; Melphalans; Melphalan L-PAMs; Menogarils; Mepitiostanes; Mercaptopurines; 6-Mecaptopurine; Mesnas; Metesinds; Methotrexates; Methoxsalens; Metomidates; Metoprines; Meturedepas; Miboplatins; Miproxifenes; Misonidazoles; Mitindomides; Mitocarcins; Mitocromins; Mitoflaxones; Mitogillins; Mitoguazones; Mitomalcins; Mitomycin Cs; Mitomycins; Mitonafides; Mitoquidones; Mitospers; Mitotanes; Mitoxantrones; Mitozolomides; Mivobulins; Mizoribines; Mofarotenes; Mopidamols; Mubritinibs; Mycophenolic Acids; Nandrolone Phenpropionates; Nedaplatins; Nelarabines; Nemorubicins; Nitracrines; Nocodazoles; Nofetumomabs; Nogalamycins; Nolatrexeds; Nortopixantrones; Octreotides; Oprelvekins; Ormaplatins; Ortataxels; Oteracils; Oxaliplatins; Oxisurans; Oxophenarsines; Paclitaxels; Pamidronates; Patupilones; Pegademases; Pegaspargases; Pegfilgrastims; Peldesines; Peliomycins; Pelitrexols; Pemetrexeds; Pentamustines; Pentostatins; Peplomycins; Perfosfamides; Perifosines; Picoplatins; Pinafides; Pipobromans; Piposulfans; Pirfenidones; Piroxantrones; Pixantrones; Plevitrexeds; Plicamycin Mithramycins; Plicamycins; Plomestanes; Plomestanes; Porfimer sodiums; Porfimers; Porfiromycins; Prednimustines; Procarbazines; Propamidines; Prospidiums; Pumitepas; Puromycins; Pyrazofurins; Quinacrines; Ranimustines; Rasburicases; Riboprines; Ritrosulfans; Rituximabs; Rogletimides; Roquinimexs; Rufocromomycins; Sabarubicins; Safingols; Sargramostims; Satraplatins; Sebriplatins; Semustines; Simtrazenes; Sizofirans; Sobuzoxanes; Sorafenibs; Sparfosates; Sparfosic Acids; Sparsomycins; Spirogermaniums; Spiromustines; Spiroplatins; Spiroplatins; Squalamines; Streptonigrins; Streptovarycins; Streptozocins; Sufosfamides; Sulofenurs; Sunitinib Malate; 6-TG; Tacedinalines; Talcs; Talisomycins; Tallimustines; Tamoxifens; Tariquidars; Tauromustines; Tecogalans; Tegafurs; Teloxantrones; Temoporfins; Temozolomides; Teniposides/VM-26s; Teniposides; Teroxirones; Testolactones; Thiamiprines; Thioguanines; Thiotepas; Tiamiprines; Tiazofurins; Tilomisoles; Tilorones; Timcodars; Timonacics; Tirapazamines; Topixantrones; Topotecans; Toremifenes; Tositumomabs; Trabectedins (Ecteinascidin 743); Trastuzumabs; Trestolones; Tretinoins/ATRA; Triciribines; Trilostanes; Trimetrexates; Triplatin Tetranitrates; Triptorelins; Trofosfamides; Tubulozoles; Ubenimexs; Uracil Mustards; Uredepas; Valrubicins; Valspodars; Vapreotides; Verteporfins; Vinblastines; Vincristines; Vindesines; Vinepidines; Vinflunines; Vinformides; Vinglycinates; Vinleucinols; Vinleurosines; Vinorelbines; Vinrosidines; Vintriptols; Vinzolidines; Vorozoles; Xanthomycin A's (Guamecyclines); Zeniplatins; Zilascorbs [2-H]; Zinostatins; Zoledronate; Zorubicins; and Zosuquidars, for example:

[0676] Aldesleukins (e.g., PROLEUKIN®); Alemtuzumabs (e.g., CAMPATH®); Alitretinoins (e.g., PANRETIN®); Allopurinols (e.g., ZYLOPRIM®); Altretamines (e.g., HEXALEN®); Amifostines (e.g., ETHYOL®); Anastrozoles (e.g., ARIMIDEX®); Arsenic Trioxides (e.g., TRISENOX®); Asparaginases (e.g., ELSPAR®); BCG Live (e.g., TICE® BCG); Bexarotenes (e.g., TARGRETIN®); Bevacizumab (AVASTIN®); Bleomycins (e.g., BLENOXANE®); Busulfan intravenous (e.g., BUSULFEX®); Busulfan orals (e.g., MYLERAN™); Calusterones (e.g., METHOSARB®); Capecitabines (e.g., XELODA®); Carboplatins (e.g., PARAPLATIN®); Carmustines (e.g., BCNUO, BiCNU®); Carmustines with Polifeprosans (e.g., GLIADEL® Wafer); Celecoxibs (e.g., CELEBREX®); Chlorambucils (e.g., LEUKERAN®); Cisplatins (e.g., PLATINOL®); Cladribines (e.g., LEUSTATIN®, 2-CdA®); Cyclophosphamides (e.g., CYTOXAN®, NEOSAR®); Cytarabines (e.g., CYTOSAR-U®); Cytarabine liposomals (e.g., DepoCyt®); Dacarbazines (e.g., DTIC-Domeυ): Dactinomycins (e.g., COSMEGEN®); Darbepoetin Alfas (e.g., ARANESP®); Daunorubicin liposomals (e.g. DAUNOXOME®); Daunorubicins/Daunomycins (e.g., CERUBIDINE®); Denileukin Diftitoxes (e.g., ONTAK®); Dexrazoxanes (e.g., ZINECARD®); Docetaxels (e.g., TAXOTERE®); Doxorubicins (e.g., ADRIAMYCINO, RUBEX®); Doxorubicin liposomals, including Doxorubicin HCl liposome injections (e.g., DOXIL®); Dromostanolone propionates (e.g., DROMOSTANOLONE® and MASTERONE® Injection); Elliott's B Solutions (e.g., Elliott's B Solution®); Epirubicins (e.g., ELLENCE®); Epoetin alfas (e.g., EPOGEN®); Estramustines (e.g., EMCYT®); Etoposide phosphates (e.g., ETOPOPHOS®); Etoposide VP-16s (e.g., VEPESID®); Exemestanes (e.g., AROMASIN®); Filgrastims (e.g., NEUPOGEN®); Floxuridines (e.g., FUDR®); Fludarabines (e.g., FLUDARA®); Fluorouracils incl. 5-FUs (e.g., ADRUCIL®); Fulvestrants (e.g., FASLODEX®); Gemcitabines (e.g., GEMZAR®); Gemtuzumabs/Ozogamicins (e.g., MYLOTARG®); Goserelin acetates (e.g., ZOLADEX®); Hydroxyureas (e.g., HYDREA®); Ibritumomabs/Tiuxetans (e.g., ZEVALIN®); Idarubicins (e.g., IDAMYCIN®); Ifosfamides (e.g., IFEX®); Imatinib mesylates (e.g., GLEEVEC®); Interferon alfa-2as (e.g., ROFERON-A®); Interferon alfa-2bs (e.g., INTRON A®); Irinotecans (e.g., CAMPTOSAR®); Letrozoles (e.g., FEMARA®); Leucovorins (e.g., WELLCOVORIN®, LEUCOVORIN®); Levamisoles (e.g., ERGAMISOL®); Lomustines/CCNUs (e.g., CeeNU®); Mechlorethamines/Nitrogen mustards (e.g., MUSTARGEN®); Megestrol acetates (e.g., MEGACE®); Melphalans/L-PAMs (e.g., ALKERAN®); Mercaptopurine incl. 6-MPs (e.g., PURINETHOL®); Mesnas (e.g., MESNEX®); Methotrexates; Methoxsalens (e.g., UVADEX®); Mitomycin Cs (e.g., MUTAMYCIN®, MITOZYTREX®); Mitotanes (e.g., LYSODREN®); Mitoxantrones (e.g., NOVANTRONE®); Nandrolone Phenpropionates (e.g., DURABOLIN-50®); Nofetumomabs (e.g., VERLUMA®); Oprelvekins (e.g., NEUMEGA®); Oxaliplatins (e.g., ELOXATIN®); Paclitaxels (e.g., PAXENE®, TAXOL®); Pamidronates (e.g., AREDIA®); Pegademases (e.g., ADAGEN®); Pegaspargases (e.g., ONCASPAR®); Pegfilgrastims (e.g., NEULASTA®); Pentostatins (e.g., NIPENT®); Pipobromans (e.g., VERCYTE®); Plicamycin/Mithramycins (e.g., MITHRACIN®); Porfimer sodiums (e.g., PHOTOFRIN®); Procarbazines (e.g., MATULANE®); Quinacrines (e.g., ATABRINE®); Rasburicases (e.g., ELITEK®); Rituximabs (e.g., RITUXAN®); Sargramostims (e.g., PROKINE®); Streptozocins (e.g., ZANOSAR®); Sunitinib Malates (e.g., SUTENT®); Talcs (e.g., SCLEROSOL®); Tamoxifens (e.g., NOLVADEX®); Temozolomides (e.g., TEMODAR®); Teniposides/VM-26s (e.g., VUMON®); Testolactones (e.g., TESLAC®); Thioguanines incl. 6-TG; Thiotepas (e.g., THIOPLEX®); Topotecans (e.g., HYCAMTIN®); Toremifenes (e.g., FARESTON®); Tositumomabs (e.g., BEXXAR®); Trastuzumabs (e.g., HERCEPTIN®); Tretinoins/ATRA (e.g., VESANOID®); Uracil Mustards; Valrubicins (e.g., VALSTAR®); Vinblastines (e.g., VELBAN®); Vincristines (e.g., ONCOVIN®); Vinorelbines (e.g., NAVELBINE®); and Zoledronates (e.g., ZOMETA®).

[0677] For example, exemplary antibiotic agents include, but are not limited to, Aminoglycosides; Amphenicols; Ansamycins; Carbacephems; Carbapenems; Cephalosporins or Cephems; Cephamycins; Clavams; Cyclic lipopeptides; Diaminopyrimidines; Ketolides; Lincosamides; Macrolides; Monobactams; Nitrofurans; Oxacephems; Oxazolidinones; Penems, thienamycins and miscellaneous beta-lactams; Penicillins; Polypeptides antibiotics; Quinolones; Sulfonamides; Sulfones; Tetracyclines; and other antibiotics (such as Clofoctols, Fusidic acids, Hexedines, Methenamines, Nitrofurantoins Nitroxolines, Ritipenems, Taurolidines, Xibomols).

[0678] Also included among exemplary therapeutic agents are coagulation factors or other blood modifiers such as antihemophilic factors, anti-inhibitor coagulant complexes, antithrombin III, coagulation Factor V, coagulation Factor VIII, coagulation Factor IX, plasma protein fractions, von Willebrand factors; antiplatelet agents (including, for example, abciximabs, anagrelides, cilostazols, clopidogrel bisulfates, dipyridamoles, epoprostenols, eptifibatides, tirofibans; colony stimulating factors (CSFs) (including, for example, Granulocyte CSFs and Granulocyte Macrophage CSFs); erythropoiesis stimulators (including, for example, erythropoietins such as darbepoetin alfas) and epoetin alfas; hemostatics and albumins (including, for example, aprotinins, combinations of antihemophilic factors and plasma, Desmopressin Acetates, and albumins); immune globulins, as well as hepatitis B immune globulins; thrombin inhibitors (including for example direct thrombin inhibitors and lepirudin), and drotrecogin alfas; anticoagulants (including, for example, dalteparins, enoxaparins and other heparins, and warfarins).

[0679] Exemplary antibodies or other therapeutic agents include, but are not limited to, Cetuximab (IMC-C225; Erbitux®); Trastuzumab (Herceptin®); Rituximab (Rituxan®; MabThera®); Bevacizumab (Avastin®); Alemtuzumab (Campath®; Campath-1H®; Mabcampath®); Panitumumab (ABX-EGF; Vectibix®); Ranibizumab (Lucentis®); Ibritumomab; Ibritumomab tiuxetan (Zevalin®); Tositumomab; Iodine I 131 Tositumomab (BEXXAR®); Catumaxomab (Removab®); Gemtuzumab; Gemtuzumab ozogamicin (Mylotarg®); Abatacept (CTLA4-Ig; Orencia®); Belatacept (L104EA29YIg; LEA29Y; LEA); Ipilimumab (MDX-010; MDX-101); Tremelimumab (ticilimumab; CP-675,206); PRS-010 (see e.g., US20090042785); PRS-050 (U.S. Pat. No. 7,585,940; US20090305982); Aflibercept (VEGF Trap, AVE005; Holash et al., (2002) PNAS 99:11393-11398); Volociximab (M200); F200 (Chimeric (human/murine) IgG4 Fab fragment of Volociximab (M200)); MORAb-009 Mouse/human chimeric IgG1 (US20050054048); Soluble fusion protein:Anti-mesothelin Fv linked to a truncated Pseudomonas exotoxin A (SS1P (CAT-5001); US20070189962); Cixutumumab (IMC-A12); Nimotuzumab (h-R3) (Spicer (2005) Curr Opin Mol Ther 7:182-191); Zalutumumab (HuMax-EGFR; Lammerts van Bueren et al. (2008) PNAS 105:6109-14); Necitumumab IMC-11F8 (Li et al. (2008) Structure 16:216-227); Sym004 (Pedersen et al. 2010 Cancer Res 70:588-597); and mAb-425.

[0680] In particular, therapeutic agents include, but are not limited to, immunoglobulins, Interferon beta, Interferon alpha-2as, Interferon alpha-1s, Interferon alpha-n3s, Interferon beta-1, Interferon beta-1 as, Interferon gamma-1bs, Peg-interferon alpha-2 and Peginterferon alpha-2bs, insulin, a bisphosphate (e.g., Pamidronates or Zoledronates), Docetaxels, Doxorubicins, Doxorubicin liposomals and bevacizumabs.

[0681] Other exemplary therapeutic agents that can be combined by co-administration and/or co-formulation with a modified PH20 polypeptide provided herein, include, but are not limited to, Adalimumabs, Agalsidase Betas, Alefacepts, Ampicillins, Anakinras, Antipoliomyelitic Vaccines, Anti-Thymocytes, Azithromycins, Becaplermins, Caspofungins, Cefazolins, Cefepimes, Cefotetans, Ceftazidimes, Ceftriaxones, Cetuximabs, Cilastatins, Clavulanic Acids, Clindamycins, Darbepoetin Alfas, Daclizumabs, Diphtheria, Diphtheria antitoxins, Diphtheria Toxoids, Efalizumabs, Epinephrines, Erythropoietin Alphas, Etanercepts, Filgrastims, Fluconazoles, Follicle-Stimulating Hormones, Follitropin Alphas, Follitropin Betas, Fosphenytoins, Gadodiamides, Gadopentetates, Gatifloxacins, Glatiramers, Granulocyte macrophage colony-stimulating factors (GM-CSFs), Goserelins, Goserelin acetates, Granisetrons, Haemophilus Influenza Bs, Haloperidols, Hepatitis vaccines, Hepatitis A Vaccines, Hepatitis B Vaccines, Ibritumomab Tiuxetans, Ibritumomabs, Tiuxetans, Immunoglobulins, Hemophilus influenza vaccines, Influenza Virus Vaccines, Infliximabs, Insulins, Insulin Glargines, Interferons, Interferon alphas, Interferon Betas, Interferon Gammas, Interferon alpha-2as, Interferon alpha-2bs, Interferon alpha-1 s, Interferon alpha-n3s, Interferon Betas, Interferon Beta-1as, Interferon Gammas, Interferon alpha-consensus, Iodixanols, Iohexols, Iopamidols, Ioversols, Ketorolacs, Laronidases, Levofloxacins, Lidocaines, Linezolids, Lorazepams, Measles Vaccines, Measles virus, Mumps viruses, Measles-Mumps-Rubella Virus Vaccines, Rubella vaccines, Medroxyprogesterones, Meropenems, Methylprednisolones, Midazolams, Morphines, Octreotides, Omalizumabs, Ondansetrons, Palivizumabs, Pantoprazoles, Pegaspargases, Pegfilgrastims, Peg-Interferon Alfa-2as, Peg-Interferon Alfa-2bs, Pegvisomants, Pertussis vaccines, Piperacillins, Pneumococcal Vaccines and Pneumococcal Conjugate Vaccines, Promethazines, Reteplases, Somatropins, Sulbactams, Sumatriptans, Tazobactams, Tenecteplases, Tetanus Purified Toxoids, Ticarcillins, Tositumomabs, Triamcinolones, Triamcinolone Acetonides, Triamcinolone hexacetonides, Vancomycins, Varicella Zoster immunoglobulins, Varicella vaccines, other vaccines, Alemtuzumabs, Alitretinoins, Allopurinols, Altretamines, Amifostines, Anastrozoles, Arsenics, Arsenic Trioxides, Asparaginases, Bacillus Calmette-Guerin (BCG) vaccines, BCG Live, Bexarotenes, Bleomycins, Busulfans, Busulfan intravenous, Busulfan orals, Calusterones, Capecitabines, Carboplatins, Carmustines, Carmustines with Polifeprosans, Celecoxibs, Chlorambucils, Cisplatins, Cladribines, Cyclophosphamides, Cytarabines, Cytarabine liposomals, Dacarbazines, Dactinomycins, Daunorubicin liposomals, Daunorubicins, Daunomycins, Denileukin Diftitoxes, Dexrazoxanes, Docetaxels, Doxorubicins, Doxorubicin liposomals, Dromostanolone propionates, Elliotts B Solutions, Epirubicins, Epoetin alfas, Estramustines, Etoposides, Etoposide phosphates, Etoposide VP-16s, Exemestanes, Floxuridines, Fludarabines, Fluorouracils, 5-Fluorouracils, Fulvestrants, Gemcitabines, Gemtuzumabs, Ozogamicins, Gemtuzumab ozogamicins, Hydroxyureas, Idarubicins, Ifosfamides, Imatinib mesylates, Irinotecans, Letrozoles, Leucovorins, Levamisoles, Lomustines, CCNUs, Mechlorethamines, Nitrogen mustards, Megestrols, Megestrol acetates, Melphalans, L-PAMs, Mercaptopurines, 6-Mercaptopurines, Mesnas, Methotrexates, Methoxsalens, Mitomycins, Mitomycin Cs, Mitotanes, Mitoxantrones, Nandrolones, Nandrolone Phenpropionates, Nofetumomabs, Oprelvekins, Oxaliplatins, Paclitaxels, Pamidronates, Pegademases, Pentostatins, Pipobromans, Plicamycins, Mithramycins, Porfimers, Porfimer sodiums, Procarbazines, Quinacrines, Rasburicases, Rituximabs, Sargramostims, Streptozocins, Talcs, Tamoxifens, Temozolomides, Teniposides, Testolactones, Thioguanines, 6-Thioguanines, Triethylenethiophosphoramides (Thiotepas), Topotecans, Toremifenes, Trastuzumabs, Tretinoins, Uracil Mustards, Valrubicins, Vinblastines, Vincristines, Vinorelbines, Zoledronates, Acivicins, Aclarubicins, Acodazoles, Acronines, Adozelesins, Aldesleukins, Retinoic Acids, Alitretinoins, 9-Cis-Retinoic Acids, Alvocidibs, Ambazones, Ambomycins, Ametantrones, Aminoglutethimides, Amsacrines, Anaxirones, Ancitabines, Anthramycins, Apaziquones, Argimesnas, Asperlins, Atrimustines, Azacitidines, Azetepas, Azotomycins, Banoxantrones, Batabulins, Batimastats, Benaxibines, Bendamustines, Benzodepas, Bicalutamides, Bietaserpines, Biricodars, Bisantrenes, Bisnafide Dimesylates, Bizelesins, Bortezomibs, Brequinars, Bropirimines, Budotitanes, Cactinomycins, Canertinibs, Caracemides, Carbetimers, Carboquones, Carmofurs, Carubicins, Carzelesins, Cedefingols, Cemadotins, Chlorambucils, Cioteronels, Cirolemycins, Clanfenurs, Clofarabines, Crisnatols, Decitabines, Dexniguldipines, Dexormaplatins, Dezaguanines, Diaziquones, Dibrospidiums, Dienogests, Dinalins, Disermolides, Dofequidars, Doxifluridines, Droloxifenes, Duazomycins, Ecomustines, Edatrexates, Edotecarins, Eflomithines, Elacridars, Elinafides, Elsamitrucins, Emitefurs, Enloplatins, Enpromates, Enzastaurins, Epipropidines, Eptaloprosts, Erbulozoles, Esorubicins, Etanidazoles, Etoglucids, Etoprines, Exisulinds, Fadrozoles, Fazarabines, Fenretinides, Fluoxymesterones, Flurocitabines, Fosquidones, Fostriecins, Fotretamines, Galarubicins, Galocitabines, Geroquinols, Gimatecans, Gimeracils, Gloxazones, Glufosfamides, Ilmofosines, Ilomastats, Imexons, Improsulfans, Indisulams, Inproquones, Interleukins, Interleukin-2s, recombinant Interleukins, Intoplicines, Iobenguanes, Iproplatins, Irsogladines, Ixabepilones, Ketotrexates, L-Alanosines, Lanreotides, Lapatinibs, Ledoxantrones, Leuprolides, Leuprorelins, Lexacalcitols, Liarozoles, Lobaplatins, Lometrexols, Lonafarnibs, Losoxantrones, Lurtotecans, Mafosfamides, Mannosulfans, Marimastats, Masoprocols, Maytansines, Mechlorethamines, Melengestrols, Melphalans, Menogarils, Mepitiostanes, Metesinds, Metomidates, Metoprines, Meturedepas, Miboplatins, Miproxifenes, Misonidazoles, Mitindomides, Mitocarcins, Mitocromins, Mitoflaxones, Mitogillins, Mitoguazones, Mitomalcins, Mitonafides, Mitoquidones, Mitospers, Mitozolomides, Mivobulins, Mizoribines, Mofarotenes, Mopidamols, Mubritinibs, Mycophenolic Acids, Nedaplatins, Neizarabines, Nemorubicins, Nitracrines, Nocodazoles, Nogalamycins, Nolatrexeds, Nortopixantrones, Ormaplatins, Ortataxels, Oteracils, Oxisurans, Oxophenarsines, Patupilones, Peldesines, Peliomycins, Pelitrexols, Pemetrexeds, Pentamustines, Peplomycins, Perfosfamides, Perifosines, Picoplatins, Pinafides, Piposulfans, Pirfenidones, Piroxantrones, Pixantrones, Plevitrexeds, Plomestanes, Porfiromycins, Prednimustines, Propamidines, Prospidiums, Pumitepas, Puromycins, Pyrazofurins, Ranimustines, Riboprines, Ritrosulfans, Rogletimides, Roquinimexs, Rufocromomycins, Sabarubicins, Safingols, Satraplatins, Sebriplatins, Semustines, Simtrazenes, Sizofirans, Sobuzoxanes, Sorafenibs, Sparfosates, Sparfosic Acids, Sparsomycins, Spirogermaniums, Spiromustines, Spiroplatins, Squalamines, Streptonigrins, Streptovarycins, Sufosfamides, Sulofenurs, Tacedinalines, Talisomycins, Tallimustines, Tariquidars, Tauromustines, Tecogalans, Tegafurs, Teloxantrones, Temoporfins, Teroxirones, Thiamiprines, Tiamiprines, Tiazofurins, Tilomisoles, Tilorones, Timcodars, Timonacics, Tirapazamines, Topixantrones, Trabectedins, Ecteinascidin 743, Trestolones, Triciribines, Trilostanes, Trimetrexates, Triplatin Tetranitrates, Triptorelins, Trofosfamides, Tubulozoles, Ubenimexs, Uredepas, Valspodars, Vapreotides, Verteporfins, Vinblastines, Vindesines, Vinepidines, Vinflunines, Vinformides, Vinglycinates, Vinleucinols, Vinleurosines, Vinrosidines, Vintriptols, Vinzolidines, Vorozoles, Xanthomycin As, Guamecyclines, Zeniplatins, Zilascorbs [2-H], Zinostatins, Zorubicins, Zosuquidars, Acetazolamides, Acyclovirs, Adipiodones, Alatrofloxacins, Alfentanils, Allergenic extracts, Alpha 1-proteinase inhibitors, Alprostadils, Amikacins, Amino acids, Aminocaproic acids, Aminophyllines, Amitriptylines, Amobarbitals, Amrinones, Analgesics, Anti-poliomyelitis vaccines, Anti-rabic serums, Anti-tetanus immunoglobulins, tetanus vaccines, Antithrombin IIIs, Antivenom serums, Argatrobans, Arginines, Ascorbic acids, Atenolols, Atracuriums, Atropines, Aurothioglucoses, Azathioprines, Aztreonams, Bacitracins, Baclofens, Basiliximabs, Benzoic acids, Benztropines, Betamethasones, Biotins, Bivalirudins, Botulism antitoxins, Bretyliums, Bumetanides, Bupivacaines, Buprenorphines, Butorphanols, Calcitonins, Calcitriols, Calciums, Capreomycins, Carboprosts, Carnitines, Cefamandoles, Cefoperazones, Cefotaximes, Cefoxitins, Ceftizoximes, Cefuroximes, Chloramphenicols, Chloroprocaines, Chloroquines, Chlorothiazides, Chlorpromazines, Chondroitinsulfuric acids, Choriogonadotropin alfas, Chromiums, Cidofovirs, Cimetidines, Ciprofloxacins, Cisatracuriums, Clonidines, Codeines, Colchicines, Colistins, Collagens, Corticorelin ovine triflutates, Corticotrophins, Cosyntropins, Cyanocobalamins, Cyclosporines, Cysteines, Dacliximabs, Dalfopristins, Dalteparins, Danaparoids, Dantrolenes, Deferoxamines, Desmopressins, Dexamethasones, Dexmedetomidines, Dexpanthenols, Dextrans, Iron dextrans, Diatrizoic acids, Diazepams, Diazoxides, Dicyclomines, Digibinds, Digoxins, Dihydroergotamines, Diltiazems, Diphenhydramines, Dipyridamoles, Dobutamines, Dopamines, Doxacuriums, Doxaprams, Doxercalciferols, Doxycyclines, Droperidols, Dyphyllines, Edetic acids, Edrophoniums, Enalaprilats, Ephedrines, Epoprostenols, Ergocalciferols, Ergonovines, Ertapenems, Erythromycins, Esmolols, Estradiols, Estrogenics, Ethacrynic acids, Ethanolamines, Ethanols, Ethiodized oils, Etidronic acids, Etomidates, Factor VIIIs, Famotidines, Fenoldopams, Fentanyls, Flumazenils, Fluoresceins, Fluphenazines, Folic acids, Fomepizoles, Fomivirsens, Fondaparinuxs, Foscarnets, Fosphenytoins, Furosemides, Gadoteridols, Gadoversetamides, Ganciclovirs, Gentamicins, Glucagons, Glucoses, Glycines, Glycopyrrolates, Gonadorelins, Gonadotropin chorionics, Haemophilus B polysaccharides, Hemins, Herbals, Histamines, Hydralazines, Hydrocortisones, Hydromorphones, Hydroxocobalamins, Hydroxyzines, Hyoscyamines, Ibutilides, Imiglucerases, Indigo carmines, Indomethacins, Iodides, Iopromides, Iothalamic acids, Ioxaglic acids, Ioxilans, Isoniazids, Isoproterenols, Japanese encephalitis vaccines, Kanamycins, Ketamines, Labetalols, Lepirudins, Levobupivacaines, Levothyroxines, Lincomycins, Liothyronines, Luteinizing hormones, Lyme disease vaccines, Mangafodipirs, Manthtols, Meningococcal polysaccharide vaccines, Meperidines, Mepivacaines, Mesoridazines, Metaraminols, Methadones, Methocarbamols, Methohexitals, Methyldopates, Methylergonovines, Metoclopramides, Metoprolols, Metronidazoles, Minocyclines, Mivacuriums, Morrhuic acids, Moxifloxacins, Muromonab-CD3s, Mycophenolate mofetils, Nafcillins, Nalbuphines, Nalmefenes, Naloxones, Neostigmines, Niacinamides, Nicardipines, Nitroglycerins, Nitroprussides, Norepinephrines, Orphenadrines, Oxacillins, Oxymorphones, Oxytetracyclines, Oxytocins, Pancuroniums, Panthenols, Pantothenic acids, Papaverines, Peginterferon-alpha (e.g., interferon alpha 2a or 2b), Penicillin Gs, Pentamidines, Pentazocines, Pentobarbitals, Perflutrens, Perphenazines, Phenobarbitals, Phentolamines, Phenylephrines, Phenytoins, Physostigmines, Phytonadiones, Polymyxin bs, Pralidoximes, Prilocaines, Procainamides, Procaines, Prochlorperazines, Progesterones, Propranolols, Pyridostigmine hydroxides, Pyridoxines, Quinidines, Quinupristins, Rabies immunoglobulins, Rabies vaccines, Ranitidines, Remifentanils, Riboflavins, Rifampins, Ropivacaines, Samariums, Scopolamines, Seleniums, Sermorelins, Sincalides, Somatrems, Spectinomycins, Streptokinases, Streptomycins, Succinylcholines, Sufentanils, Sulfamethoxazoles, Tacrolimuses, Terbutalines, Teriparatides, Testosterones, Tetanus antitoxins, Tetracaines, Tetradecyl sulfates, Theophyllines, Thiamines, Thiethylperazines, Thiopentals, Thyroid stimulating hormones, Tinzaparins, Tirofibans, Tobramycins, Tolazolines, Tolbutamides, Torsemides, Tranexamic acids, Treprostinils, Trifluoperazines, Trimethobenzamides, Trimethoprims, Tromethamines, Tuberculins, Typhoid vaccines, Urofollitropins, Urokinases, Valproic acids, Vasopressins, Vecuroniums, Verapamils, Voriconazoles, Warfarins, Yellow fever vaccines, Zidovudines, Zincs, Ziprasidone hydrochlorides, Aclacinomycins, Actinomycins, Adriamycins, Azaserines, 6-Azauridines, Carzinophilins, Chromomycins, Denopterins, 6-Diazo-5-Oxo-L-Norleucines, Enocitabines, Floxuridines, Olivomycins, Pirarubicins, Piritrexims, Pteropterins, Tegafurs, Tubercidins, Alteplases, Arcitumomabs, bevacizumabs, Botulinum Toxin Type As, Botulinum Toxin Type Bs, Capromab Pendetides, Daclizumabs, Dornase alfas, Drotrecogin alfas, Imciromab Pentetates, and Iodine-131s.

[0682] For example, a modified PH20 polypeptide provided herein can be used in combination therapy methods with an insulin (e.g. fast-acting insulin) to increase subcutaneous delivery of the insulin (see e.g., U.S. Pat. No. 7,767,429; U.S. Pat. No. 7,846,431; U.S. Publication No. US20090304665; and U.S. application Ser. Nos. 13/507,263; 13/507,262 and Ser. No. 13/507,261). Such methods include methods of direct administration, and pump and continuous infusion methods, including open and closed pump systems. For example, exemplary insulins that can be administered with a modified PH20 hyaluronidase provided herein are fast-acting insulins or insulin analogs. For example, a co-administered insulin includes a regular insulin, insulin aspart, insulin lispro, insulin glulisine or other similar analog variants. Exemplary insulins are insulins that contain an A chain set forth in SEQ ID NO:393 and a B chain set forth in SEQ ID NO:394 or variants that contain one or more amino acid modifications compared to a human insulin set forth in SEQ ID NO: 393 and 394 (A and B chains). For example, exemplary insulin analogs are known to one of skill in the art, and include, but are not limited to, those set forth in SEQ ID NOS:393 (A-chain) and having a B-chain set forth in any of SEQ ID NOS: 395-397. The modified PH20 can be co-administered or co-formulated with insulin to treat any condition that is amenable to treatment with insulin. Therapeutic uses include, but are not limited to, treatment for type 1 diabetes mellitus, type 2 diabetes mellitus, gestational diabetes, and for glycemic control in critically ill patients.

[0683] 2. Methods of Treating Hyaluronan-Associated Diseases and Conditions (e.g., Tumors)

[0684] In particular, any of the modified PH20 hyaluronidase can be used to treat hyaluronan-associated diseases or conditions. Typically, hyaluronan-associated diseases and conditions are associated with elevated hyaluronan (HA) expression in a tissue, cell, or body fluid (e.g., tumor tissue or tumor-associated tissue, blood, or interstitial space).

[0685] A subject with a hyaluronan-associated disease or condition can be identified to assess if the level of hyaluronan is elevated by comparison of the levels of hyaluronan in a sample (e.g. tissue, cell or body fluid) to a control sample, e.g., another tissue, cell or body fluid. The elevated hyaluronan expression can be elevated compared to a normal tissue, cell or body fluid, for example, a tissue, cell or body fluid that is analogous to the sample being tested, but isolated from a different subject, such as a subject that is normal (i.e., does not have a disease or condition, or does not have the type of disease or condition that the subject being tested has), for example, a subject that does not have a hyaluronan-associated disease or condition. The elevated hyaluronan expression can be elevated compared to an analogous tissue from another subject that has a similar disease or condition, but whose disease is not as severe and/or is not hyaluronan-associated or expresses relatively less hyaluronan and thus is hyaluronan-associated to a lesser degree. For example, the subject being tested can be a subject with a hyaluronan-associated cancer, where the HA amounts in the tissue, cell or fluid are relatively elevated compared to a subject having a less severe cancer, such as an early stage, differentiated or other type of cancer. In another example, the cell, tissue or fluid contains elevated levels of hyaluronan compared to a control sample, such as a fluid, tissue, extract (e.g., cellular or nuclear extract), nucleic acid or peptide preparation, cell line, biopsy, standard or other sample, with a known amount or relative amount of HA, such as a sample, for example a tumor cell line, known to express relatively low levels of HA, such as exemplary tumor cell lines described herein that express low levels of HA, for example, the HCT 116 cell line, the HT29 cell line, the NCI H460 cell line, the DU145 cell line, the Capan-1 cell line, and tumors from tumor models generated using such cell lines.

[0686] Hyaluronan-associated diseases and conditions include those associated with high interstitial fluid pressure, such as disc pressure, proliferative disorders, such as cancer and benign prostatic hyperplasia, and edema. Edema can result from or be manifested in, for example, organ transplant, stroke or brain trauma. Proliferative disorders include, but are not limited to, cancer, smooth muscle cell proliferation, systemic sclerosis, cirrhosis of the liver, adult respiratory distress syndrome, idiopathic cardiomyopathy, lupus erythematosus, retinopathy, e.g., diabetic retinopathy or other retinopathies, cardiac hyperplasia, reproductive system associated disorders, such as benign prostatic hyperplasia (BPH) and ovarian cysts, pulmonary fibrosis, endometriosis, fibromatosis, hamartomas, lymphangiomatosis, sarcoidosis, desmoid tumors. Cancers include solid and lymphatic/blood tumors and metastatic disease, and undifferentiated tumors. The tumors amenable to treatment typically exhibit cellular and/or stromal expression of a hyaluronan, compared to a non-cancerous tissue of the same tissue type or compared to a non-metastatic tumor of the same tumor-type. Cancers include any one or more of ovarian cancer, in situ carcinoma (ISC), squamous cell carcinoma (SCC), prostate cancer, pancreatic cancer, other gastric cancers, non-small cell lung cancer, breast cancer, brain cancer and colon cancer.

[0687] Modified PH20 polypeptides provided herein, such as PEGylated forms thereof, can be used to treat tumors. Thus, in addition to its indirect anticancer effects, hyaluronidases also have direct anticarcinogenic effects. Hyaluronidase prevents growth of tumors transplanted into mice (De Maeyer et al., 1992, Int. J. Cancer 51:657-660) and inhibits tumor formation upon exposure to carcinogens (Pawlowski et al., 1979, Int. J. Cancer 23:105-109; Haberman et al., 1981, Proceedings of the 17th Annual Meeting of the American Society of Clinical Oncology, Washington, D.C., 22:105, abstract no. 415). PH20 hyaluronidase has been shown to treat various tumors (see e.g., U.S. Publication No. US2010/0003238 and U.S. application Ser. No. 13/135,817, published as U.S. Publication No. US20120020951).

[0688] The hyaluronan-rich cancer can be a cancer in which the cancer cells produce HALOs, cancers that have elevated expression of hyaluronan (as determined by immunostaining, e.g., histological staining of sections from the tumor), cancers that have elevated HAS2 (Hyaluronan synthase 2), cancers that do not produce hyaluronidase (HYAL1) in vitro. Hyaluronan-rich cancers can be identified by any method for assessing hyaluronan expression, and other known methods for assaying protein/mRNA expression.

[0689] Several hyaluronan-rich cancers have been identified. In some cases, hyaluronan expression correlates with poor prognosis, for example, decreased survival rate and/or recurrence-free survival rate, metastases, angiogenesis, cancer cell invasion into other tissues/areas, and other indicators of poor prognosis. Such correlation has been observed, for example, in hyaluronan-rich tumors including ovarian cancer, SCC, ISC, prostate cancer, lung cancer, including non-small-cell lung cancer (NSCLC), breast cancer, colon cancer and pancreatic cancer (see, for example, Anttila et al., Cancer Research, 60:150-155 (2000); Karvinen et al., British Journal of Dermatology, 148:86-94 (2003); Lipponen et al., Eur. Journal of Cancer, 849-856 (2001); Pirinen et al., Int. J. Cancer: 95: 12-17 (2001); Auvinen et al., American Journal of Pathology, 156(2):529-536 (2000); Ropponen et al., Cancer Research, 58: 342-347 (1998)). Thus, hyaluronan-rich cancers can be treated by administration of a hyaluronidase, such as a modified PH20 hyaluronidase provided herein, to treat one or more symptoms of the cancer. Hyaluronan-rich tumors include, but are not limited to those of the prostate, breast, colon, ovarian, stomach, head and neck and other tumors and cancers.

[0690] Other hyaluronan-associated diseases or conditions that are associated with excess glycosaminoglycans and that can be treated with a modified PH20 polypeptide provided herein include, but are not limited to, cardiovascular disease (e.g., following ischemia reperfusion; in arteriosclerosis); vitrectomy and ophthalmic disorders and conditions (e.g., in methods to liquefy the vitreous humor of the eye; reduce postoperative pressure; other ocular surgical procedures such as glaucoma, vitreous and retina surgery and in corneal transplantation); in hypodermoclysis (i.e., infusion of fluids and electrolytes into the hypodermis of the skin); cosmetic applications (e.g., in the treatment of cellulite, “pigskin” edema or “orange peel” edema); organ transplantation (e.g., associated with interstitial edemas in connection with grafting of an organ); and pulmonary disease.

[0691] 3. Other Uses

[0692] In further examples of its therapeutic use, modified PH20 polypeptides provided herein, can be used for such purposes as an antidote to local necrosis from paravenous injection of necrotic substances such as vinca alkaloids (Few et al. (1987) Amer. J. Matern. Child Nurs. 12, 23-26), treatment of ganglion cysts (Paul et al. (1997) J Hand Surg. 22 (2): 219-21) and treatment of tissue necrosis due to venous insufficiency (Elder et al. (1980) Lancet 648-649). Modified PH20 polypeptides also can be used to treat ganglion cysts (also known as a wrist cyst, Bible cyst, or dorsal tendon cyst), which are the most common soft tissue mass of the hand and are fluid filled sacs that can be felt below the skin.

[0693] Modified PH20 polypeptides can be used in the treatment of spinal cord injury by degrading chondroitin sulfate proteoglycans (CSPGs). Following spinal cord injury, glial scars containing CSPGs are produced by astrocytes. CSPGs play a crucial role in the inhibition of axon growth. In addition, the expression of CSPG has been shown to increase following injury of the central nervous system (CNS). Soluble PH20 also can be utilized for the treatment of herniated disks in a process known as chemonucleolysis. Chondroitinase ABC, an enzyme cleaving similar substrates as hyaluronidase, can induce the reduction of intradiscal pressure in the lumbar spine. There are three types of disk injuries. A protruded disk is one that is intact but bulging. In an extruded disk, the fibrous wrapper has torn and the NP has oozed out, but is still connected to the disk. In a sequestered disk, a fragment of the NP has broken loose from the disk and is free in the spinal canal. Chemonucleolysis is typically effective on protruded and extruded disks, but not on sequestered disk injuries.

### I. EXAMPLES

[0694] The following examples are included for illustrative purposes only and are not intended to limit the scope of the invention.

### Example 1

### Preparation of Recombinant Human PH20 Hyaluronidase (rHuPH20)

[0695] A. Generation of a Soluble rHuPH20-Expressing Cell Line

[0696] A recombinant human PH20 hyaluronidase designated rHuPH20 was generated as described in published U.S. Publication No. US20110053247, now U.S. Pat. No. 8,187,855. Briefly, Chinese Hamster Ovary (CHO cells) were transfected with the plasmid designated pCI-PH20-IRES-DHFR-SV40pa (HZ24) plasmid, whose sequence is set forth in SEQ ID NO:5 (see e.g., U.S. Pat. Nos. 7,767,429 and 7,781,607 and U.S. Publication No. 2006-0104968). The HZ24 plasmid vector for expression of rHuPH20 contains a pCI vector backbone (Promega), DNA encoding amino acids 1-482 of human PH20 hyaluronidase set forth in SEQ ID NO:6, an internal ribosomal entry site (IRES) from the ECMV virus (Clontech), and the mouse dihydrofolate reductase (DHFR) gene. The vector encodes soluble hyaluronidase and the product is designated rHuPH20. The pCI vector backbone also includes DNA encoding the Beta-lactamase resistance gene (AmpR), an fl origin of replication, a Cytomegalovirus immediate-early enhancer/promoter region (CMV), a chimeric intron, and an SV40 late polyadenylation signal (SV40). The DNA encoding the soluble rHuPH20 construct contains an NheI site and a Kozak consensus sequence prior to the DNA encoding the methionine at amino acid position 1 of the native 35 amino acid signal sequence of human PH20, and a stop codon following the DNA encoding the tyrosine corresponding to amino acid position 482 of the human PH20 hyaluronidase set forth in SEQ ID NO:6, followed by a BamHI restriction site.

[0697] Non-transfected DG44 CHO cells growing in GIBCO Modified CD-CHO media for DHFR(−) cells, supplemented with 4 mM Glutamine and 18 mL/L Pluronic F68/L (Gibco), were seeded at 0.5×10⁶ cells/mL in a shaker flask in preparation for transfection. Cells were grown at 37° C. in 5% CO₂ in a humidified incubator, shaking at 120 rpm. Exponentially growing non-transfected DG44 CHO cells were tested for viability prior to transfection.

[0698] Sixty million viable cells of the non-transfected DG44 CHO cell culture were pelleted and resuspended to a density of 2×10⁷ cells in 0.7 mL of 2× transfection buffer (2× HeBS: 40 mM HEPES, pH 7.0, 274 mM NaCl, 10 mM KCl, 1.4 mM Na₂HPO₄, 12 mM dextrose). To each aliquot of resuspended cells, 0.09 mL (250 μg) of the linear HZ24 plasmid (linearized by overnight digestion with Cla I (New England Biolabs) was added, and the cell/DNA solutions were transferred into 0.4 cm gap BTX (Gentronics) electroporation cuvettes at room temperature. A negative control electroporation was performed with no plasmid DNA mixed with the cells. The cell/plasmid mixes were electroporated with a capacitor discharge of 330 V and 960 μF or at 350 V and 960 μF.

[0699] The cells were removed from the cuvettes after electroporation and transferred into 5 mL of Modified CD-CHO media for DHFR(−) cells, supplemented with 4 mM Glutamine and 18 mL/L Pluronic F68/L (Gibco), and allowed to grow in a well of a 6-well tissue culture plate without selection for 2 days at 37° C. in 5% CO₂ in a humidified incubator.

[0700] Two days post-electroporation, 0.5 mL of tissue culture media was removed from each well and tested for the presence of hyaluronidase activity, using the microturbidity assay described in Example 3. The results are set forth in Table 4.

TABLE 4
Initial Hyaluronidase Activity of HZ24 Transfected DG44 CHO
cells at 40 hours post-transfection

| | Dilution | Activity (Units/mL) |
|---|---|---|
| Transfection 1 330 V | 1 to 10 | 0.25 |
| Transfection 2 350 V | 1 to 10 | 0.52 |
| Negative Control | 1 to 10 | 0.015 |

[0701] Cells from Transfection 2 (350V) were collected from the tissue culture well, counted and diluted to 1×10⁴ to 2×10⁴ viable cells per mL. A 0.1 mL aliquot of the cell suspension was transferred to each well of five, 96 well round bottom tissue culture plates. One hundred microliters of CD-CHO media (GIBCO) containing 4 mM GlutaMAX™-1 supplement (GIBCO™, Invitrogen Corporation) and without hypoxanthine and thymidine supplements were added to the wells containing cells (final volume 0.2 mL). Ten clones were identified from the 5 plates grown without methotrexate (Table 5).

TABLE 5
Hyaluronidase activity of identified clones

| Plate/Well ID | Relative Hyaluronidase |
|---|---|
| 1C3 | 261 |
| 2C2 | 261 |
| 3D3 | 261 |
| 3E5 | 243 |
| 3C6 | 174 |
| 2G8 | 103 |
| 1B9 | 304 |
| 2D9 | 273 |
| 4D10 | 302 |

[0702] Six HZ24 clones were expanded in culture and transferred into shaker flasks as single cell suspensions. Clones 3D3, 3E5, 2G8, 2D9, 1E11, and 4D10 were plated into 96-well round bottom tissue culture plates using a two-dimensional infinite dilution strategy in which cells were diluted 1:2 down the plate, and 1:3 across the plate, starting at 5000 cells in the top left hand well. Diluted clones were grown in a background of 500 non-transfected DG44 CHO cells per well, to provide necessary growth factors for the initial days in culture. Ten plates were made per subclone, with 5 plates containing 50 nM methotrexate and 5 plates without methotrexate.

[0703] Clone 3D3 produced 24 visual subclones (13 from the no methotrexate treatment, and 11 from the 50 nM methotrexate treatment). Significant hyaluronidase activity was measured in the supernatants from 8 of the 24 subclones (>50 Units/mL), and these 8 subclones were expanded into T-25 tissue culture flasks. Clones isolated from the methotrexate treatment protocol were expanded in the presence of 50 nM methotrexate. Clone 3D35M was further expanded in 500 nM methotrexate giving rise to clones producing hyaluronidase activity in excess of 1,000 Units/mL in shaker flasks (clone 3D35M; or Gen1 3D35M). A master cell bank (MCB) of the 3D35M cells was then prepared.

B. Production of Gen2 Cells Containing Soluble Human PH20 (rHuPH20)

[0704] The Gen1 3D35M cell line described in Example 1.A was adapted to higher methotrexate levels to produce generation 2 (Gen2) clones. 3D35M cells were seeded from established methotrexate-containing cultures into CD CHO medium containing 4 mM GlutaMAX-1™ and 1.0 μM methotrexate. The cells were adapted to a higher methotrexate level by growing and passaging them 9 times over a period of 46 days in a 37° C., 7% CO₂ humidified incubator. The amplified population of cells was cloned out by limiting dilution in 96-well tissue culture plates containing medium with 2.0 μM methotrexate. After approximately 4 weeks, clones were identified and clone 3E10B was selected for expansion. 3E10B cells were grown in CD CHO medium containing 4 mM GlutaMAX-1™ and 2.0 μM methotrexate for 20 passages. A master cell bank (MCB) of the 3E10B cell line was created and frozen and used for subsequent studies.

[0705] Amplification of the cell line continued by culturing 3E10B cells in CD CHO medium containing 4 mM GlutaMAX-1™ and 4.0 μM methotrexate. After the 12^{th} passage, cells were frozen in vials as a research cell bank (RCB). One vial of the RCB was thawed and cultured in medium containing 8.0 μM methotrexate. After 5 days, the methotrexate concentration in the medium was increased to 16.0 μM, then 20.0 μM 18 days later. Cells from the 8^{th} passage in medium containing 20.0 μM methotrexate were cloned out by limiting dilution in 96-well tissue culture plates containing CD CHO medium containing 4 mM GlutaMAX-1™ and 20.0 μM methotrexate. Clones were identified 5-6 weeks later and clone 2B2 was selected for expansion in medium containing 20.0 μM methotrexate. After the 11^{th} passage, 2B2 cells were frozen in vials as a research cell bank (RCB).

[0706] The resulting 2B2 cells are dihydrofolate reductase deficient (dhfr−) DG44 CHO cells that express soluble recombinant human PH20 (rHuPH20). The soluble PH20 is present in 2B2 cells at a copy number of approximately 206 copies/cell. Southern blot analysis of SpeI-, XbaI- and BamHI/HindIII-digested genomic 2B2 cell DNA using a rHuPH20-specific probe revealed the following restriction digest profile: one major hybridizing band of ˜7.7 kb and four minor hybridizing bands (˜13.9, ˜6.6, ˜5.7 and ˜4.6 kb) with DNA digested with SpeI; one major hybridizing band of ˜5.0 kb and two minor hybridizing bands (˜13.9 and ˜6.5 kb) with DNA digested with XbaI; and one single hybridizing band of ˜1.4 kb observed using 2B2 DNA digested with BamHI/HindIII.

C. Production of Gen2 Soluble rHuPH20 in 300 L Bioreactor Cell Culture

[0707] A vial of HZ24-2B2 was thawed and expanded from shaker flasks through 36 L spinner flasks in CD-CHO media (Invitrogen, Carlsbad, Calif.) supplemented with 20 μM methotrexate and GlutaMAX-1™ (Invitrogen). Briefly, the vial of cells was thawed in a 37° C. water bath, medium was added and the cells were centrifuged. The cells were re-suspended in a 125 mL shake flask with 20 mL of fresh medium and placed in a 37° C., 7% CO₂ incubator. The cells were expanded up to 40 mL in the 125 mL shake flask. When the cell density reached greater than 1.5×10⁶ cells/mL, the culture was expanded into a 125 mL spinner flask in a 100 mL culture volume. The flask was incubated at 37° C., 7% CO₂. When the cell density reached greater than 1.5×10⁶ cells/mL, the culture was expanded into a 250 mL spinner flask in 200 mL culture volume, and the flask was incubated at 37° C., 7% CO₂. When the cell density reached greater than 1.5×10⁶ cells/mL, the culture was expanded into a 1 L spinner flask in 800 mL culture volume and incubated at 37° C., 7% CO₂. When the cell density reached greater than 1.5×10⁶ cells/mL the culture was expanded into a 6 L spinner flask in 5000 mL culture volume and incubated at 37° C., 7% CO₂. When the cell density reached greater than 1.5×10⁶ cells/mL the culture was expanded into a 36 L spinner flask in 32 L culture volume and incubated at 37° C., 7% CO₂.

[0708] A 400 L reactor was sterilized and 230 mL of CD-CHO media were added. Before use, the reactor was checked for contamination. Approximately 30 L cells were transferred from the 36 L spinner flasks to the 400 L bioreactor (Braun) at an inoculation density of 4.0×10⁵ viable cells per mL and a total volume of 260 L. Parameters were: temperature setpoint, 37° C.; Impeller Speed 40-55 RPM; Vessel Pressure: 3 psi; Air Sparge 0.5-1.5 L/Min.; Air Overlay: 3 L/min. The reactor was sampled daily for cell counts, pH verification, media analysis, protein production and retention. Also, during the run nutrient feeds were added. At 120 hrs (day 5), 10.4 L of Feed #1 Medium (4× CD-CHO+33 g/L Glucose+160 mL/L Glutamax-1™+83 mL/L Yeastolate+33 mg/L rHuInsulin) was added. At 168 hours (day 7), 10.8 L of Feed #2 (2× CD-CHO+33 g/L Glucose+80 mL/L Glutamax-1™+167 mL/L Yeastolate+0.92 g/L Sodium Butyrate) was added, and culture temperature was changed to 36.5° C. At 216 hours (day 9), 10.8 L of Feed #3 (1× CD-CHO+50 g/L Glucose+50 mL/L Glutamax-1™+250 mL/L Yeastolate+1.80 g/L Sodium Butyrate) was added, and culture temperature was changed to 36° C. At 264 hours (day 11), 10.8 L of Feed #4 (1×CD-CHO+33 g/L Glucose+33 mL/L Glutamax-1™+250 mL/L Yeastolate+0.92 g/L Sodium Butyrate) was added, and culture temperature was changed to 35.5° C. The addition of the feed media was observed to dramatically enhance the production of soluble rHuPH20 in the final stages of production. The reactor was harvested at 14 or 15 days or when the viability of the cells dropped below 40%. The process resulted in a final productivity of 17,000 Units per mL with a maximal cell density of 12 million cells/mL. At harvest, the culture was sampled for mycoplasma, bioburden, endotoxin and virus in vitro and in vivo, by Transmission Electron Microscopy (TEM) and enzyme activity.

[0709] The culture was pumped by a peristaltic pump through four Millistak filtration system modules (Millipore) in parallel, each containing a layer of diatomaceous earth graded to 4-8 μm and a layer of diatomaceous earth graded to 1.4-1.1 μm, followed by a cellulose membrane, then through a second single Millistak filtration system (Millipore) containing a layer of diatomaceous earth graded to 0.4-0.11 μm and a layer of diatomaceous earth graded to <0.1 μm, followed by a cellulose membrane, and then through a 0.22 μm final filter into a sterile single use flexible bag with a 350 L capacity. The harvested cell culture fluid was supplemented with 10 mM EDTA and 10 mM Tris to a pH of 7.5. The culture was concentrated 10× with a tangential flow filtration (TFF) apparatus using four Sartoslice TFF 30 kDa molecular weight cut-off (MWCO) polyether sulfone (PES) filter (Sartorious), followed by a 10× buffer exchange with 10 mM Tris, 20 mM Na₂SO₄, pH 7.5 into a 0.22 μm final filter into a 50 L sterile storage bag.

[0710] The concentrated, diafiltered harvest was inactivated for virus. Prior to viral inactivation, a solution of 10% Triton® X-100, 3% tri (n-butyl) phosphate (TNBP) was prepared. The concentrated, diafiltered harvest was exposed to 1% Triton® X-100, 0.3% TNBP for 1 hour in a 36 L glass reaction vessel immediately prior to purification on the Q column.

D. Purification of Gen2 Soluble rHuPH20

[0711] A Q Sepharose (Pharmacia) ion exchange column (9 L resin, H=29 cm, D=20 cm) was prepared. Wash samples were collected for a determination of pH, conductivity and endotoxin (LAL assay). The column was equilibrated with 5 column volumes of 10 mM Tris, 20 mM Na₂SO₄, pH 7.5. Following viral inactivation, the concentrated, diafiltered harvest was loaded onto the Q column at a flow rate of 100 cm/hr. The column was washed with 5 column volumes of 10 mM Tris, 20 mM Na₂SO₄, pH 7.5 and 10 mM HEPES, 50 mM NaCl, pH7.0. The protein was eluted with 10 mM HEPES, 400 mM NaCl, pH 7.0 into a 0.22 μm final filter into sterile bag. The eluate sample was tested for bioburden, protein concentration and hyaluronidase activity. A₂₈₀ absorbance readings were taken at the beginning and end of the exchange.

[0712] Phenyl-Sepharose (Pharmacia) hydrophobic interaction chromatography was next performed. A Phenyl-Sepharose (PS) column (19-21 L resin, H=29 cm, D=30 cm) was prepared. The wash was collected and sampled for pH, conductivity and endotoxin (LAL assay). The column was equilibrated with 5 column volumes of 5 mM potassium phosphate, 0.5 M ammonium sulfate, 0.1 mM CaCl₂, pH 7.0. The protein eluate from the Q sepharose column was supplemented with 2M ammonium sulfate, 1 M potassium phosphate and 1 M CaCl₂ stock solutions to yield final concentrations of 5 mM, 0.5 M and 0.1 mM, respectively. The protein was loaded onto the PS column at a flow rate of 100 cm/hr and the column flow thru collected. The column was washed with 5 mM potassium phosphate, 0.5 M ammonium sulfate and 0.1 mM CaCl₂ pH 7.0 at 100 cm/hr and the wash was added to the collected flow thru. Combined with the column wash, the flow through was passed through a 0.22 μm final filter into a sterile bag. The flow through was sampled for bioburden, protein concentration and enzyme activity.

[0713] An aminophenyl boronate column (Prometics) was prepared. The wash was collected and sampled for pH, conductivity and endotoxin (LAL assay). The column was equilibrated with 5 column volumes of 5 mM potassium phosphate, 0.5 M ammonium sulfate. The PS flow through containing purified protein was loaded onto the aminophenyl boronate column at a flow rate of 100 cm/hr. The column was washed with 5 mM potassium phosphate, 0.5 M ammonium sulfate, pH 7.0. The column was washed with 20 mM bicine, 0.5 M ammonium sulfate, pH 9.0. The column was washed with 20 mM bicine, 100 mM sodium chloride, pH 9.0. The protein was eluted with 50 mM HEPES, 100 mM NaCl, pH 6.9 and passed through a sterile filter into a sterile bag. The eluted sample was tested for bioburden, protein concentration and enzyme activity.

[0714] The hydroxyapatite (HAP) column (Biorad) was prepared. The wash was collected and tested for pH, conductivity and endotoxin (LAL assay). The column was equilibrated with 5 mM potassium phosphate, 100 mM NaCl, 0.1 mM CaCl₂, pH 7.0. The aminophenyl boronate purified protein was supplemented to final concentrations of 5 mM potassium phosphate and 0.1 mM CaCl₂ and loaded onto the HAP column at a flow rate of 100 cm/hr. The column was washed with 5 mM potassium phosphate, pH 7, 100 mM NaCl, 0.1 mM CaCl₂. The column was next washed with 10 mM potassium phosphate, pH 7, 100 mM NaCl, 0.1 mM CaCl₂. The protein was eluted with 70 mM potassium phosphate, pH 7.0 and passed through a 0.22 μm sterile filter into a sterile bag. The eluted sample was tested for bioburden, protein concentration and enzyme activity.

[0715] The HAP purified protein was then passed through a virus removal filter. The sterilized Viosart filter (Sartorius) was first prepared by washing with 2 L of 70 mM potassium phosphate, pH 7.0. Before use, the filtered buffer was sampled for pH and conductivity. The HAP purified protein was pumped via a peristaltic pump through the 20 nM virus removal filter. The filtered protein in 70 mM potassium phosphate, pH 7.0 was passed through a 0.22 μm final filter into a sterile bag. The filtered sample was tested for protein concentration, enzyme activity, oligosaccharide, monosaccharide and sialic acid profiling. The sample also was tested for process related impurities.

[0716] The protein in the filtrate was then concentrated to 10 mg/mL using a 10 kDa molecular weight cut off (MWCO) Sartocon Slice tangential flow filtration (TFF) system (Sartorius). The filter was first prepared by washing with 10 mM histidine, 130 mM NaCl, pH 6.0 and the permeate was sampled for pH and conductivity. Following concentration, the concentrated protein was sampled and tested for protein concentration and enzyme activity. A 6× buffer exchange was performed on the concentrated protein into the final buffer: 10 mM histidine, 130 mM NaCl, pH 6.0. Following buffer exchange, the concentrated protein was passed though a 0.22 μm filter into a 20 L sterile storage bag. The protein was sampled and tested for protein concentration, enzyme activity, free sulfydryl groups, oligosaccharide profiling and osmolality. Lot number WRS2 was used as a standard in the assays described below, the results showed that the test description for appearance was clear and colorless; the pH was 7.4; the endotoxin level was <0.01 EU/mL; the osmolality was 308 mOsm/Kg; the density was 1.005 g/mL; the rHuPH20 content was 1.3 ppm; and the hyaluronidase activity was 145 USP U/mL.

[0717] The sterile filtered bulk protein was then asceptically dispensed at 20 mL into 30 mL sterile Teflon vials (Nalgene). The vials were then flash frozen and stored at −20±5° C.

### Example 2

### Generation of a PH20 Mutant Library

### A. Cloning and Mutagenesis

[0718] In this example, a human hyaluronidase PH20 library was created by cloning DNA encoding human PH20 into a plasmid followed by transfection and protein expression.

[0719] The library was created by mutagenesis of a PH20 template that is a codon optimized version of PH20 with an Ig Kappa leader sequence. Specifically, for generating the library of variants, the HZ24-PH20(OHO)-IRES-SEAP expression vector (set forth in SEQ ID NO:4) was used as a template, which contains the sequence of nucleotides encoding PH20 set forth in SEQ ID NO:1, which encodes a PH20 set forth in SEQ ID NO:2 or a mature PH20 set forth in SEQ ID NO:3 lacking residues 1-22 corresponding to the IgK signal sequence. The backbone of the vector was derived from the original HZ24 vector containing the DHFR selection marker (see Example 1 and SEQ ID NO:5) with the addition of an IgK leader sequence and codon optimization. The expression vector also was modified to contain the gene for secreted alkaline phosphatase (SEAP). Hence, in addition to sequence encoding PH20, the HZ24-PH20(OHO)-IRES-SEAP expression vector also contains an internal ribosome entry site (EMCV IRES) that is linked to the coding sequence for the gene for secreted alkaline phosphatase (SEAP), and a single CMV promoter that drives expression of PH20 and SEAP in the construct. It also contains a gene for ampilcillin resistance. With reference to the sequence of nucleotides set forth in SEQ ID NO:4, the sequence of nucleotides encoding PH20 corresponds to nucleotides 1058-2464 (including the IgK leader sequence), the sequence of nucleotides encoding SEAP corresponds to nucleotides 2970-4529, and the ampicillin resistance gene corresponds to nucleotides 5778-6635.

[0720] The first library was made to generate encoded variant proteins wherein each of residues 23-469 of SEQ ID NO:2 (corresponding to residues 1-447 of SEQ ID NO:3 or residues 36-482 of SEQ ID NO:6) was changed to one of about 15 amino acid residues, such that each member contained a single amino change. The resulting library contained 6753 variant members, each containing a single amino acid mutation compared to residues 23-469 of SEQ ID NO:2 (corresponding to residues 1-447 of SEQ ID NO:3 or residues 36-482 of SEQ ID NO:6). Glycerol stocks of the resulting library were prepared and stored at −80° C. The amino acid replacements (mut) in each member are listed in Table 6 below, and correspond to amino acid replacements with reference to the sequence of amino acids of PH20 set forth in SEQ ID NO:3 (and SEQ ID NOS: 7 or 32-66, which are the mature sequence of PH20 or other C-terminally truncated fragments thereof). The corresponding mutated codons (cod) of each PH20 variant in the library are also listed in Table 6, and correspond to nucleotide residue changes in the corresponding encoding nucleotide for PH20 set forth as 1058-2464 of SEQ ID NO:4. Each member was expressed and screened for hyaluronidase activity as described below.

TABLE 6
PH20 Variants

| mut | cod | mut | cod | mut | cod | mut | cod | mut | cod | mut | cod |
|---|---|---|---|---|---|---|---|---|---|---|---|
| L001A | GCG | Y066S | AGT | R132N | AAT | G198T | ACT | V265G | GGT | I331K | AAG |
| L001C | TGT | Y066T | ACG | R132P | CCT | G198V | GTT | V265H | CAT | I331L | CTG |
| L001D | GAT | Y066V | GTG | R132Q | CAG | G198W | TGG | V265I | ATT | I331Q | CAG |
| L001E | GAG | I067C | TGT | R132S | AGT | G198Y | TAT | V265K | AAG | I331R | CGT |
| L001F | TTT | I067D | GAT | R132T | ACT | Y199A | GCG | V265L | CTG | I331S | AGT |
| L001G | GGT | I067E | GAG | R132V | GTG | Y199C | TGT | V265M | ATG | I331T | ACT |
| L001H | CAT | I067F | TTT | R132Y | TAT | Y199E | GAG | V265N | AAT | I331W | TGG |
| L001K | AAG | I067G | GGG | S133A | GCT | Y199G | GGG | V265P | CCT | I331Y | TAT |
| L001N | AAT | I067H | CAT | S133D | GAT | Y199H | CAT | V265Q | CAG | I332A | GCT |
| L001P | CCG | I067L | TTG | S133E | GAG | Y199I | ATT | V265R | AGG | I332C | TGT |
| L001Q | CAG | I067N | AAT | S133F | TTT | Y199K | AAG | V265S | TCT | I332D | GAT |
| L001R | CGG | I067P | CCG | S133G | GGG | Y199L | CTT | V265W | TGG | I332E | GAG |
| L001S | TCT | I067Q | CAG | S133H | CAT | Y199N | AAT | V265Y | TAT | I332F | TTT |
| L001T | ACG | I067R | CGG | S133I | ATT | Y199P | CCT | F266A | GCG | I332G | GGT |
| L001V | GTG | I067T | ACG | S133L | CTG | Y199Q | CAG | F266C | TGT | I332H | CAT |
| L001W | TGG | I067V | GTT | S133M | ATG | Y199R | AGG | F266D | GAT | I332K | AAG |
| N002A | GCT | I067W | TGG | S133N | AAT | Y199S | TCG | F266G | GGG | I332L | CTG |
| N002C | TGT | I067Y | TAT | S133P | CCT | Y199T | ACG | F266H | CAT | I332N | AAT |
| N002F | TTT | D068A | GCT | S133R | CGG | Y199W | TGG | F266L | CTT | I332P | CCT |
| N002G | GGG | D068C | TGT | S133T | ACT | N200A | GCT | F266M | CCG | I332R | AGG |
| N002H | CAT | D068E | GAG | S133V | GTT | N200D | GAT | F266P | ATG | I332S | AGT |
| N002I | ATT | D068G | GGG | S133W | TGG | N200F | CAG | F266Q | CAG | I332T | ACT |
| N002K | AAG | D068H | CAC | I134A | GCT | N200G | GGT | F266R | CGG | I332Y | TAT |
| N002L | TTG | D068I | ATT | I134C | TGT | N200H | CAT | F266S | TCG | N333A | GCT |
| N002P | CCG | D068K | AAG | I134D | GAT | N200K | AAG | F266T | ACG | N333E | GAG |
| N002Q | CAG | D068L | TTG | I134F | TTT | N200L | CTG | F266V | GTG | N333G | GGT |
| N002S | AGT | D068P | CCT | I134G | GGG | N200M | ATG | F266W | TGG | N333H | CAT |
| N002T | ACG | D068Q | CAG | I134H | CAT | N200P | CCT | F266Y | TAT | N333I | ATT |
| N002V | GTT | D068R | CGG | I134K | AAG | N200Q | CAG | A267D | GAT | N333K | AAG |
| N002W | TGG | D068S | TCG | I134L | TTG | N200R | AGG | A267E | GAG | N333L | CTG |
| N002Y | TAT | D068T | ACT | I134P | CCT | N200S | TCT | A267G | GGT | N333M | ATG |
| F003A | GCT | D068V | GTG | I134Q | CAG | N200T | ACT | A267H | CAT | N333P | CCT |
| F003E | GAG | D068Y | TAT | I134R | CGT | N200V | GTG | A267I | ATT | N333R | CGG |
| F003G | GGG | S069A | GCT | I134S | TCG | N200W | TGG | A267K | AAG | N333S | AGT |
| F003H | CAT | S069C | TGT | I134T | ACT | N200Y | TAT | A267L | CTT | N333T | ACT |
| F003I | ATT | S069E | GAG | I134V | GTG | G201A | GCG | A267M | ATG | N333V | GTT |
| F003K | AAG | S069F | TTT | I134W | TGG | G201E | GAG | A267N | AAT | N333W | TGG |
| F003L | TTG | S069G | GGG | E135A | GCT | G201F | TTT | A267P | CCG | N333Y | TAT |
| F003M | ATG | S069I | ATT | E135C | TGT | G201H | CAT | A267R | AGG | V334A | GCT |
| F003N | AAT | S069L | CTT | E135D | GAT | G201K | AAG | A267S | TCT | V334C | TGT |
| F003P | CCT | S069M | ATG | E135F | TTT | G201L | CTT | A267T | GTG | V334D | GAT |
| F003R | CGT | S069N | AAT | E135G | GGG | G201M | ATG | A267V | ACT | V334E | GAG |
| F003S | TCG | S069P | CCT | E135H | CAT | G201N | AAT | A267W | TGG | V334G | GGG |
| F003T | ACT | S069R | CGT | E135K | AAG | G201P | CCT | Y268A | GCT | V334H | CAT |
| F003V | GTG | S069T | ACG | E135L | TTG | G201Q | CAG | Y268C | TGT | V334L | TTG |
| F003Y | TAT | S069V | GTT | E135N | AAT | G201R | CGT | Y268F | TTT | V334M | ATG |
| R004A | GCG | S069W | TGG | E135P | CCT | G201S | TCG | Y268G | GGG | V334N | AAT |
| R004D | GAT | S069Y | TAT | E135Q | CAG | G201T | ACG | Y268H | CAT | V334P | CCT |
| R004E | GAG | I070A | GCT | E135R | CGG | G201V | GTG | Y268K | AAG | V334Q | CAG |
| R004F | TTT | I070C | TGT | E135S | TCT | G201W | TGG | Y268L | CTT | V334R | AGG |
| R004G | GGG | I070F | TTT | E135W | TGG | S202A | GCG | Y268N | AAT | V334S | TCT |
| R004I | ATT | I070G | GGG | E135Y | TAT | S202E | GAG | Y268P | CCT | V334T | ACT |
| R004L | TTG | I070H | CAT | L136A | GCT | S202F | TTT | Y268Q | CAG | V334Y | TAT |
| R004M | ATG | I070K | AAG | L136C | TGT | S202G | GGT | Y268R | CGT | T335A | GCT |
| R004N | AAT | I070L | TTG | L136D | GAT | S202H | CAT | Y268S | TCG | T335C | TGT |
| R004P | CCT | I070N | AAT | L136F | TTT | S202K | AAG | Y268T | ACT | T335F | TTT |
| R004S | TCT | I070P | CCG | L136G | GGT | S202M | ATG | Y268V | GTG | T335G | GGT |
| R004T | ACG | I070Q | CAG | L136H | CAT | S202N | AAT | Y268W | TGG | T335H | CAT |
| R004V | GTG | I070R | CGT | L136I | ATT | S202P | CCT | T269A | GCT | T335I | ATT |
| R004W | TGG | I070S | TCT | L136M | ATG | S202Q | CAG | T269C | TGT | T335K | AAG |
| R004Y | TAT | I070T | ACT | L136N | AAT | S202R | CGT | T269D | GAT | T335L | TTG |
| A005D | GAT | I070V | GTT | L136P | CCT | S202T | ACG | T269E | GAG | T335N | AAT |
| A005G | GGG | I070Y | TAT | L136Q | CAG | S202V | GTT | T269G | GGT | T335P | CCT |
| A005H | CAT | T071A | GCT | L136R | CGT | S202W | TGG | T269K | AAG | T335Q | CAG |
| A005I | ATT | T071C | TGT | L136S | TCG | S202Y | TAT | T269L | CTG | T335S | TCT |
| A005L | CTT | T071D | GAT | L136T | ACT | C203A | GCG | T269M | ATG | T335V | GTG |
| A005M | ATG | T071E | GAG | L136W | TGG | C203D | GAT | T269N | AAT | T335W | TGG |
| A005N | AAT | T071G | GGG | V137A | GCT | C203E | GAG | T269P | CCG | T335Y | TAT |
| A005P | CCG | T071H | CAT | V137C | TGT | C203G | GGG | T269Q | CAG | L336A | GCT |
| A005Q | CAG | T071L | TTG | V137E | GAG | C203H | CAT | T269R | AGG | L336E | GAG |
| A005R | AGG | T071M | ATG | V137F | TTT | C203L | CTT | T269S | TCG | L336F | TTT |
| A005S | TCG | T071N | AAT | V137G | GGG | C203M | ATG | T269V | GTG | L336G | GGG |
| A005T | ACG | T071P | CCT | V137H | CAT | C203N | AAT | T269Y | TAT | L336H | CAT |
| A005V | GTG | T071Q | CAG | V137I | ATT | C203P | CCG | R270A | GCT | L336K | AAG |
| A005W | TGG | T071R | CGG | V137L | TTG | C203Q | CAG | R270C | TGT | L336M | ATG |
| A005Y | TAT | T071S | TCG | V137N | AAT | C203R | AGG | R270D | GAT | L336N | AAT |
| P006A | GCG | T071V | GTG | V137P | CCT | C203S | AGT | R270E | GAG | L336P | CCT |
| P006D | GAT | T071Y | TAT | V137Q | CAG | C203T | ACT | R270F | TTT | L336R | AGG |
| P006E | GAG | G072A | GCT | V137R | CGT | C203V | GTG | R270G | GGG | L336S | TCT |
| P006F | TTT | G072C | TGT | V137S | TCT | C203W | TGG | R270H | CAT | L336T | ACT |
| P006G | GGG | G072D | GAT | V137T | ACT | F204A | GCG | R270I | ATT | L336V | GTG |
| P006H | CAT | G072E | GAG | V137W | TGG | F204C | TGT | R270M | ATG | L336W | TGG |
| P006K | AAG | G072F | TTT | V137Y | TAT | F204E | GAG | R270N | AAT | L336Y | TAT |
| P006L | CTT | G072H | CAT | Q138A | GCT | F204G | GGG | R270P | CCT | A337C | TGT |
| P006N | AAT | G072I | ATT | Q138C | TGT | F204H | CAT | R270Q | CAG | A337F | TTT |
| P006Q | CAG | G072K | AAG | Q138E | GAG | F204I | ATT | R270S | TCG | A337G | GGG |
| P006R | AGG | G072L | TTG | Q138F | TTT | F204K | AAG | R270T | ACT | A337H | CAT |
| P006S | AGT | G072M | ATG | Q138G | GGG | F204L | CTT | R270V | GTG | A337I | ATT |
| P006T | ACG | G072P | CCT | Q138H | CAT | F204M | ATG | R270Y | TAT | A337K | AAG |
| P006V | GTG | G072Q | CAG | Q138I | ATT | F204P | CCT | I271A | GCT | A337L | TTG |
| P006W | TGG | G072R | CGG | Q138L | TTG | F204Q | CAG | I271D | GAT | A337M | ATG |
| P006Y | TAT | G072S | TCT | Q138M | ATG | F204R | AGG | I271E | GAG | A337N | AAT |
| P007A | GCT | G072T | ACT | Q138N | AAT | F204S | AGT | I271F | TTT | A337P | CCT |
| P007C | TGT | G072V | GTG | Q138R | CGT | F204T | ACT | I271G | GGG | A337R | CGG |
| P007D | GAT | G072W | TGG | Q138S | AGT | F204V | GTG | I271H | CAT | A337S | TCT |
| P007F | TTT | G072Y | TAT | Q138V | GTT | F204W | TGG | I271K | AAG | A337T | ACT |
| P007G | GGT | V073A | GCG | Q138W | TGG | N205A | GCG | I271L | CTT | A337V | GTT |
| P007H | CAT | V073C | TGT | Q138Y | TAT | N205D | GAT | I271M | ATG | A337W | TGG |
| P007I | ATT | V073D | GAT | Q139A | GCT | N205E | GAG | I271P | CCT | A338C | TGT |
| P007K | AAG | V073F | TTT | Q139C | TGT | N205F | TTT | I271R | AGG | A338D | GAT |
| P007L | TTG | V073G | GGG | Q139D | GAT | N205G | GGG | I271S | AGT | A338E | GAG |
| P007M | ATG | V073H | CAT | Q139E | GAG | N205K | AAG | I271T | ACT | A338F | TTT |
| P007Q | CAG | V073K | AAG | Q139F | TTT | N205L | CTG | I271V | GTT | A338G | GGG |
| P007R | CGG | V073L | CTT | Q139G | GGG | N205M | ATG | I271W | TGG | A338H | CAT |
| P007S | AGT | V073M | ATG | Q139H | CAT | N205P | CCT | V272A | GCT | A338I | ATT |
| P007T | ACT | V073P | CCG | Q139K | AAG | N205R | AGG | V272C | TGT | A338K | AAG |
| P007V | GTG | V073Q | CAG | Q139L | CTG | N205S | TCG | V272D | GAT | A338L | CTT |
| P007W | TGG | V073R | TGG | Q139M | ATG | N205T | ACG | V272E | GAG | A338P | CCT |
| P007Y | TAT | V073S | TCG | Q139P | CCT | N205V | GTG | V272G | GGG | A338Q | CAG |
| V008A | GCT | V073T | ACG | Q139R | CGT | N205W | TGG | V272H | CAT | A338R | CGT |
| V008D | GAT | V073W | CGG | Q139S | TCT | N205Y | TAT | V272K | AAG | A338S | TCG |
| V008E | GAG | T074A | GCT | Q139T | ACT | V206C | TGT | V272L | TTG | A338T | ACT |
| V008G | GGT | T074C | TGT | Q139V | GTG | V206D | GAT | V272M | ATG | A338V | GTG |
| V008H | CAT | T074E | GAG | Q140A | GCT | V206F | TTT | V272N | AAT | K339D | GAT |
| V008I | ATT | T074F | TTT | Q140C | TGT | V206G | GGG | V272P | CCT | K339E | GAG |
| V008L | TTG | T074G | GGT | Q140D | GAT | V206H | CAT | V272R | AGG | K339F | TTT |
| V008M | ATG | T074H | CAT | Q140F | TTT | V206I | ATT | V272S | TCG | K339G | GGG |
| V008N | AAT | T074K | AAG | Q140G | GGG | V206K | AAG | V272T | ACT | K339H | CAT |
| V008P | CCT | T074L | TTG | Q140H | CAT | V206L | CTT | V272W | TGG | K339L | CTG |
| V008Q | CAG | T074M | ATG | Q140I | ATT | V206M | ATG | F273A | GCT | K339M | ATG |
| V008R | CGG | T074N | AAT | Q140K | AAG | V206P | CCG | F273C | TGT | K339N | AAT |
| V008S | TCT | T074P | CCG | Q140L | TTG | V206Q | CAG | F273D | GAT | K339P | CCT |
| V008T | ACT | T074R | CGG | Q140M | ATG | V206R | CGG | F273G | GGG | K339R | CGG |
| V008W | TGG | T074S | TCG | Q140R | CGG | V206S | TCT | F273H | CAT | K339S | AGT |
| I009A | GCT | T074V | GTG | Q140S | AGT | V206T | ACG | F273I | ATT | K339T | ACT |
| I009C | TGT | T074W | TGG | Q140V | GTG | V206Y | TAT | F273L | CTG | K339V | GTT |
| I009D | GAT | V075A | GCG | Q140W | TGG | E207A | GCT | F273P | CCT | K339W | TGG |
| I009E | GAG | V075C | TGT | Q140Y | TAT | E207F | TTT | F273Q | CAG | K339Y | TAT |
| I009G | GGG | V075D | GAT | N141A | GCT | E207G | GGG | F273R | CGG | M340A | GCT |
| I009H | CAT | V075F | TTT | N141D | GAT | E207H | CAT | F273S | TCG | M340C | TGT |
| I009K | AAG | V075G | GGG | N141E | GAG | E207I | ATT | F273T | ACG | M340D | GAT |
| I009L | CTT | V075H | CAT | N141F | TTT | E207K | AAG | F273V | GTT | M340E | GAG |
| I009N | AAT | V075L | CTT | N141G | GGT | E207L | TTG | F273W | TGG | M340F | TTT |
| I009P | CCT | V075M | ATG | N141H | CAT | E207M | ATG | F273Y | TAT | M340G | GGG |
| I009Q | CAG | V075N | AAT | N141L | TTG | E207P | CCG | T274A | GCG | M340H | CAT |
| I009R | CGG | V075P | CCG | N141M | ATG | E207Q | CAG | T274C | TGT | M340K | AAG |
| I009S | AGT | V075Q | CAG | N141P | CCT | E207R | AGG | T274E | GAG | M340L | CTG |
| I009T | ACG | V075R | CGT | N141Q | CAG | E207S | TCT | T274F | ATG | M340P | CCT |
| I009V | GTT | V075S | TCT | N141R | CGT | E207T | ACG | T274G | GGG | M340R | CGG |
| P010D | GAT | V075T | ACT | N141S | TCT | E207V | GTT | T274H | CAT | M340S | TCG |
| P010E | GAG | V075W | TGG | N141T | ACT | E207W | TGG | T274L | CTG | M340T | ACT |
| P010F | TTT | V075Y | TAT | N141V | GTT | I208A | GCT | T274N | AAT | M340V | GTG |
| P010G | GGT | N076A | GCT | N141W | TGG | I208C | TGT | T274P | CCT | M340W | TGG |
| P010H | CAT | N076C | TGT | N141Y | TAT | I208D | GAT | T274Q | CAG | C341A | GCT |
| P010I | ATT | N076D | GAT | V142C | TGT | I208E | GAG | T274R | CGT | C341E | GAG |
| P010L | CTT | N076F | TTT | V142D | GAT | I208G | GGG | T274S | AGT | C341G | GGG |
| P010M | ATG | N076G | GGG | V142E | GAG | I208K | AAG | T274V | GTT | C341H | CAT |
| P010N | AAT | N076I | ATT | V142G | GGG | I208L | TTG | T274W | TGG | C341K | AAG |
| P010Q | CAG | N076K | AAG | V142H | CAT | I208M | ATG | T274Y | TAT | C341L | TTG |
| P010R | CGG | N076L | CTG | V142I | ATT | I208P | CCG | D275A | GCT | C341M | ATG |
| P010S | TCG | N076P | CCT | V142K | AAG | I208Q | CAG | D275C | TGT | C341N | AAT |
| P010T | ACT | N076Q | CAG | V142L | TTG | I208R | CGT | D275E | GAG | C341Q | CAG |
| P010W | TGG | N076R | CGT | V142M | ATG | I208S | AGT | D275F | TTT | C341R | AGG |
| P010Y | TAT | N076S | AGT | V142N | AAT | I208T | ACG | D275G | GGG | C341S | TCT |
| N011A | GCG | N076T | ACT | V142P | CCT | I208V | GTG | D275I | ATT | C341T | ACT |
| N011C | TGT | N076V | GTT | V142Q | CAG | I208W | TGG | D275K | AAG | C341V | GTT |
| N011D | GAT | N076W | TGG | V142R | CGG | K209A | GCG | D275L | CTT | C341W | TGG |
| N011E | GAG | G077D | GAT | V142S | AGT | K209C | TGT | D275M | ATG | C341Y | TAT |
| N011F | TTT | G077E | GAG | V142T | ACT | K209D | GAT | D275Q | CAG | S342A | GCT |
| N011G | GGG | G077F | TTT | Q143C | TGT | K209E | GAG | D275R | CGT | S342D | GAT |
| N011H | CAT | G077H | CAT | Q143E | GAG | K209F | TTT | D275S | TCG | S342E | GAG |
| N011I | ATT | G077K | AAG | Q143F | TTT | K209G | GGT | D275T | ACT | S342F | TTT |
| N011K | AAG | G077L | TTG | Q143G | GGG | K209L | CTG | D275V | GTG | S342G | GGG |
| N011L | CTG | G077M | ATG | Q143H | CAT | K209N | AAT | D275W | TGG | S342H | CAT |
| N011P | CCG | G077N | AAT | Q143I | ATT | K209P | CCG | Q276C | TGT | S342I | ATT |
| N011S | TCG | G077P | CCG | Q143K | AAG | K209R | CGG | Q276D | GAT | S342K | AAG |
| N011T | ACG | G077Q | CAG | Q143L | TTG | K209S | AGT | Q276E | GAG | S342L | TTG |
| N011W | TGG | G077R | CGT | Q143M | ATG | K209T | ACT | Q276F | TTT | S342M | ATG |
| N011Y | TAT | G077S | TCG | Q143N | AAT | K209V | GTT | Q276G | GGG | S342P | CCT |
| V012A | GCT | G077T | ACG | Q143P | CCT | K209W | TGG | Q276H | CAT | S342Q | CAG |
| V012D | GAT | G077V | GTG | Q143R | CGG | K209Y | TAT | Q276I | ATT | S342R | CGG |
| V012E | GAG | G077Y | TAT | Q143S | TCG | R210A | GCG | Q276L | CTT | S342T | ACT |
| V012G | GGG | G078A | GCG | Q143T | ACT | R210C | TGT | Q276M | ATG | S342Y | TAT |
| V012H | CAT | G078C | TGT | Q143V | GTG | R210D | GAT | Q276P | CCT | Q343C | TGT |
| V012I | ATT | G078D | GAT | Q143Y | TAT | R210E | GAG | Q276R | CGT | Q343D | GAT |
| V012K | AAG | G078H | CAT | L144A | GCT | R210G | GGT | Q276S | AGT | Q343E | GAG |
| V012L | CTT | G078I | ATT | L144E | GAG | R210K | AAG | Q276V | GTT | Q343F | TTT |
| V012M | ATG | G078K | AAG | L144F | TTT | R210L | CTG | Q276W | TGG | Q343G | GGG |
| V012N | AAT | G078L | TTG | L144G | GGG | R210M | ATG | Q276Y | TAT | Q343I | ATT |
| V012P | CCG | G078M | ATG | L144I | ATT | R210N | AAT | V277A | GCT | Q343L | CTT |
| V012R | AGG | G078P | CCG | L144K | AAG | R210P | CCT | V277C | TGT | Q343M | ATG |
| V012S | TCG | G078Q | CAG | L144N | AAT | R210S | TCG | V277D | GAT | Q343P | CCT |
| V012T | ACT | G078R | AGG | L144P | CCT | R210T | ACT | V277E | GAG | Q343R | AGG |
| V012W | TGG | G078S | TCG | L144Q | CAG | R210V | GTG | V277G | GGG | Q343S | AGT |
| P013A | GCT | G078T | ACT | L144R | CGT | R210W | TGG | V277H | CAT | Q343T | ACT |
| P013E | GAG | G078V | GTG | L144S | TCT | R210Y | TAT | V277K | AAG | Q343V | GTG |
| P013F | TTT | G078Y | TAT | L144T | ACT | N211A | GCG | V277L | TTG | Q343W | TGG |
| P013G | GGG | I079A | GCT | L144V | GTT | N211C | TGT | V277M | ATG | Q343Y | TAT |
| P013H | CAT | I079D | GAT | L144W | TGG | N211F | TTT | V277N | AAT | V344E | GAG |
| P013I | ATT | I079F | TTT | L144Y | TAT | N211G | GGG | V277Q | CAG | V344F | TTT |
| P013L | CTT | I079G | GGG | S145A | GCT | N211H | CAT | V277R | AGG | V344G | GGG |
| P013M | ATG | I079H | CAT | S145C | TGT | N211I | ATT | V277S | TCT | V344H | CAT |
| P013Q | CAG | I079K | AAG | S145D | GAT | N211K | AAG | V277T | ACT | V344I | ATT |
| P013R | CGT | I079L | TTG | S145E | GAG | N211L | CTG | V277Y | TAT | V344L | CTG |
| P013S | TCG | I079N | AAT | S145F | TTT | N211M | ATG | L278A | GCT | V344M | ATG |
| P013T | ACT | I079P | CCG | S145G | GGG | N211P | CCT | L278E | GAG | V344N | AAT |
| P013V | GTG | I079R | CGT | S145H | CAT | N211R | CGG | L278F | TTT | V344P | CCT |
| P013W | TGG | I079S | AGT | S145L | TTG | N211S | AGT | L278G | GGG | V344Q | CAG |
| P013Y | TAT | I079T | ACT | S145M | ATG | N211T | ACT | L278H | CAT | V344R | CGT |
| F014A | GCG | I079V | GTT | S145N | AAT | N211V | GTT | L278I | ATT | V344S | TCG |
| F014D | GAT | I079W | TGG | S145P | CCT | N211W | TGG | L278K | AAG | V344T | ACT |
| F014E | GAG | I079Y | TAT | S145R | CGT | D212A | GCT | L278M | TTT | V344W | TGG |
| F014G | GGT | P080A | GCG | S145T | ACT | D212E | GAG | L278N | AAT | V344Y | TAT |
| F014H | CAT | P080D | GAT | S145V | GTT | D212G | GGG | L278P | CCG | L345A | GCT |
| F014I | ATT | P080E | GAG | S145W | TGG | D212H | CAT | L278R | CGT | L345C | TGT |
| F014K | AAG | P080F | TTT | L146A | GCT | D212I | ATT | L278S | TCT | L345D | GAT |
| F014M | ATG | P080G | GGG | L146C | TGT | D212K | AAG | L278T | ACT | L345E | GAG |
| F014N | AAT | P080I | ATT | L146E | GAG | D212L | CTG | L278V | GTT | L345G | GGG |
| F014P | CCT | P080K | AAG | L146G | GGG | D212M | ATG | L278Y | TAT | L345H | CAT |
| F014Q | CAG | P080L | CTT | L146H | CAT | D212N | AAT | K279A | GCG | L345K | AAG |
| F014R | CGG | P080M | ATG | L146I | ATT | D212P | CCT | K279C | TGT | L345N | AAT |
| F014T | ACT | P080N | AAT | L146K | AAG | D212Q | CAG | K279D | GAT | L345P | CCT |
| F014V | GTG | P080R | AGG | L146N | AAT | D212S | TCG | K279F | TTT | L345Q | CAG |
| F014W | TGG | P080S | TCT | L146P | CCT | D212T | ACT | K279G | GGG | L345R | CGT |
| L015A | GCG | P080T | ACG | L146Q | CAG | D212V | GTG | K279H | CAT | L345T | ACT |
| L015E | GAG | P080V | GTG | L146R | CGG | D212W | TGG | K279L | CTG | L345V | GTT |
| L015F | TTT | P080Y | TAT | L146S | TCG | D213A | GCT | K279P | CCT | L345W | TGG |
| L015G | GGG | Q081A | GCT | L146T | ACT | D213E | GAG | K279Q | CAG | L345Y | TAT |
| L015K | AAG | Q081C | TGT | L146V | GTT | D213G | GGG | K279R | AGG | C346A | GCT |
| L015M | ATG | Q081E | GAG | L146Y | TAT | D213H | CAT | K279S | TCT | C346D | GAT |
| L015N | AAT | Q081F | TTT | T147A | GCT | D213K | AAG | K279T | ACG | C346F | TTT |
| L015P | CCG | Q081G | GGG | T147C | TGT | D213L | CTG | K279V | GTG | C346G | GGG |
| L015Q | CAG | Q081H | CAT | T147D | GAT | D213M | ATG | K279W | TGG | C346I | ATT |
| L015R | CGG | Q081L | CTG | T147F | TTT | D213N | AAT | K279Y | TAT | C346K | AAG |
| L015S | TCG | Q081M | ATG | T147G | GGT | D213P | CCT | F280D | GAT | C346L | CTT |
| L015T | ACT | Q081N | AAT | T147I | ATT | D213Q | CAG | F280E | GAG | C346M | ATG |
| L015V | GTT | Q081P | CCG | T147L | CTT | D213R | CGT | F280G | GGG | C346P | CCT |
| L015W | TGG | Q081R | AGG | T147M | ATG | D213S | TCG | F280H | CAT | C346Q | CAG |
| L015Y | TAT | Q081S | TCT | T147P | CCT | D213V | GTG | F280I | ATT | C346R | CGG |
| W016A | GCG | Q081V | GTT | T147Q | CAG | D213W | TGG | F280L | TTG | C346S | TCT |
| W016C | TGT | Q081W | TGG | T147R | CGT | D213Y | TAT | F280M | ATG | C346T | ACT |
| W016D | GAT | Q081Y | TAT | T147S | AGT | L214A | GCG | F280N | AAT | C346V | GTG |
| W016E | GAG | K082A | GCT | T147V | GTT | L214C | TGT | F280P | CCT | C346W | TGG |
| W016F | TTT | K082E | GAG | T147W | TGG | L214D | GAT | F280Q | CAG | Q347A | GCT |
| W016G | GGT | K082G | GGT | T147Y | TAT | L214E | GAG | F280R | CGT | Q347C | TGT |
| W016H | CAT | K082H | CAT | E148C | TGT | L214G | GGG | F280S | TCG | Q347E | GAG |
| W016K | AAG | K082I | ATT | E148F | TTT | L214H | CAT | F280T | ACT | Q347F | TTT |
| W016L | CTT | K082L | CTT | E148G | GGG | L214K | AAG | F280V | GTG | Q347G | GGT |
| W016M | ATG | K082M | ATG | E148H | CAT | L214N | AAT | F280W | TGG | Q347I | ATT |
| W016P | CCT | K082N | AAT | E148I | ATT | L214P | CCG | L281A | GCG | Q347L | TTG |
| W016R | CGT | K082P | CCT | E148K | AAG | L214Q | CAG | L281D | GAT | Q347M | ATG |
| W016S | TCG | K082Q | CAG | E148L | CTG | L214R | CGG | L281F | TTT | Q347P | CCT |
| W016T | ACT | K082R | CGT | E148P | CCT | L214S | TCG | L281G | GGT | Q347R | AGG |
| W016Y | TAT | K082S | AGT | E148Q | CAG | L214T | ACG | L281H | CAT | Q347S | TCT |
| A017D | GAT | K082T | ACT | E148R | CGG | L214V | GTG | L281I | ATT | Q347T | ACT |
| A017E | GAG | K082V | GTG | E148S | TCT | L214Y | TAT | L281K | AAG | Q347V | GTG |
| A017G | GGG | K082W | TGG | E148T | ACT | S215A | GCT | L281N | AAT | Q347W | TGG |
| A017H | CAT | K082Y | TAT | E148V | GTG | S215C | TGT | L281P | CCG | Q347Y | TAT |
| A017I | ATT | I083E | GAG | E148W | TGG | S215D | GAT | L281Q | CAG | E348C | TGT |
| A017L | CTT | I083F | TTT | E148Y | TAT | S215E | GAG | L281R | CGG | E348D | GAT |
| A017N | AAT | I083G | GGT | A149C | TGT | S215G | GGG | L281S | AGT | E348G | GGT |
| A017P | CCG | I083H | CAT | A149E | GAG | S215H | CAT | L281V | GTT | E348H | CAT |
| A017Q | CAG | I083K | AAG | A149F | TTT | S215K | AAG | L281W | TGG | E348I | ATT |
| A017R | AGG | I083L | CTG | A149G | GGT | S215L | TTG | L281Y | TAT | E348L | TTG |
| A017S | TCG | I083N | AAT | A149K | AAG | S215M | ATG | S282A | GCG | E348M | ATG |
| A017T | ACG | I083P | CCT | A149L | TTG | S215P | CCG | S282C | TGT | E348P | CCT |
| A017V | GTG | I083Q | CAA | A149M | ATG | S215Q | CAG | S282D | GAT | E348Q | CAG |
| A017W | TGG | I083R | CGT | A149P | CCT | S215R | CGG | S282E | GAG | E348R | CGG |
| A017Y | TAT | I083S | TCG | A149Q | CAG | S215T | ACT | S282F | TTT | E348S | TCT |
| W018C | TGT | I083T | ACT | A149R | CGG | S215V | GTG | S282G | GGT | E348T | ACT |
| W018D | GAT | I083V | GTT | A149S | TCT | S215W | TGG | S282L | CTT | E348V | GTT |
| W018F | TTT | I083Y | TAT | A149T | ACT | W216D | GAT | S282M | ATG | E348W | TGG |
| W018G | GGG | S084D | GAT | A149V | GTT | W216E | GAG | S282P | CCT | E348Y | TAT |
| W018H | CAT | S084E | GAG | A149W | TGG | W216G | GGT | S282Q | CAG | Q349A | GCT |
| W018I | ATT | S084F | TTT | A149Y | TAT | W216H | CAT | S282R | CGT | Q349D | GAT |
| W018L | CTG | S084G | GGT | T150A | GCT | W216I | ATT | S282T | ACT | Q349E | GAG |
| W018M | ATG | S084H | CAT | T150C | TGT | W216K | AAG | S282V | GTT | Q349F | TTT |
| W018P | CCG | S084I | ATT | T150D | GAT | W216L | CTG | S282W | TGG | Q349G | GGT |
| W018Q | CAG | S084L | CTT | T150E | GAG | W216M | ATG | S282Y | TAT | Q349H | CAT |
| W018R | CGG | S084M | ATG | T150F | TTT | W216N | AAT | Q283A | GCG | Q349K | AAG |
| W018S | AGT | S084N | AAT | T150G | GGG | W216P | CCT | Q283C | TGT | Q349L | CTG |
| W018T | ACG | S084P | CCT | T150I | ATT | W216Q | CAG | Q283D | GAT | Q349M | ATG |
| W018V | GTG | S084Q | CAG | T150L | TTG | W216R | CGG | Q283E | GAG | Q349N | AAT |
| W018Y | TAT | S084R | CGG | T150N | AAT | W216T | ACG | Q283F | TTT | Q349P | CCT |
| N019A | GCG | S084T | ACT | T150P | CCT | W216V | GTG | Q283G | GGG | Q349R | CGT |
| N019C | TGT | S084W | TGG | T150R | AGG | W216Y | TAT | Q283H | CAT | Q349S | TCG |
| N019F | TTT | S084Y | TAT | T150S | TCT | L217A | GCG | Q283L | CTT | Q349T | ACT |
| N019G | GGG | L085A | GCT | T150V | GTG | L217C | TGT | Q283N | AAT | Q349V | GTG |
| N019H | CAT | L085C | TGT | T150W | TGG | L217E | GAG | Q283P | CCG | Q349W | TGG |
| N019I | ATT | L085D | GAT | T150Y | TAT | L217G | GGT | Q283R | CGT | Q349Y | TAT |
| N019L | CTG | L085E | GAG | E151A | GCT | L217H | CAT | Q283S | TCT | G350A | GCT |
| N019M | ATG | L085F | TTT | E151C | TGT | L217I | ATT | Q283T | ACT | G350D | GAT |
| N019P | CCG | L085G | GGG | E151G | GGT | L217M | ATG | Q283W | TGG | G350E | GAG |
| N019Q | CAG | L085H | CAT | E151H | CAT | L217P | CCG | Q283Y | TAT | G350F | TTT |
| N019R | CGT | L085K | AAG | E151K | AAG | L217Q | CAG | D284A | GCT | G350H | CAT |
| N019S | TCG | L085N | AAT | E151L | TTG | L217R | AGG | D284C | TGT | G350K | AAG |
| N019V | GTT | L085P | CCT | E151M | ATG | L217S | TCT | D284E | GAG | G350L | CTG |
| N019W | TGG | L085Q | CAG | E151N | AAT | L217T | ACG | D284G | GGT | G350M | ATG |
| N019Y | TAT | L085R | CGT | E151Q | CAG | L217V | GTG | D284H | CAT | G350N | AAT |
| A020D | GAT | L085S | TCG | E151R | AGG | L217W | TGG | D284I | ATT | G350P | CCT |
| A020E | GAG | L085T | ACT | E151S | TCG | L217Y | TAT | D284L | TTG | G350R | CGT |
| A020F | TTT | L085V | GTT | E151T | ACT | W218A | GCT | D284M | ATG | G350S | TCT |
| A020G | GGG | Q086A | GCT | E151V | GTT | W218D | GAT | D284N | AAT | G350T | ACT |
| A020H | CAT | Q086C | TGT | E151W | TGG | W218F | TTT | D284P | CCG | G350V | GTG |
| A020K | AAG | Q086D | GAT | E151Y | TAT | W218G | GGT | D284Q | CAG | G350Y | TAT |
| A020L | CTG | Q086E | GAG | K152A | GCT | W218H | CAT | D284S | TCT | V351A | GCT |
| A020N | AAT | Q086F | TTT | K152C | TGT | W218I | ATT | D284T | ACG | V351C | TGT |
| A020P | CCG | Q086G | GGT | K152F | TTT | W218K | AAG | D284V | GTT | V351D | GAT |
| A020Q | CAG | Q086H | CAT | K152G | GGT | W218L | CTT | D284Y | TAT | V351E | GAG |
| A020R | CGT | Q086I | ATT | K152I | ATT | W218M | ATG | E285A | GCG | V351F | TTT |
| A020S | TCT | Q086K | AAG | K152L | TTG | W218P | CCT | E285F | TTT | V351G | GGT |
| A020T | ACT | Q086L | CTG | K152M | ATG | W218Q | CAG | E285G | GGG | V351H | CAT |
| A020V | GTT | Q086M | ATG | K152N | AAT | W218R | CGG | E285H | CAT | V351I | ATT |
| A020Y | TAT | Q086N | AAT | K152P | CCT | W218S | TCG | E285K | AAG | V351L | TTG |
| P021A | GCG | Q086P | CCT | K152R | AGG | W218T | ACT | E285M | ATG | V351N | AAT |
| P021C | TGT | Q086R | CGG | K152S | TCT | W218V | GTG | E285N | AAT | V351Q | CAG |
| P021D | GAT | Q086S | TCT | K152T | ACT | N219A | GCG | E285P | CCT | V351R | AGG |
| P021E | GAG | Q086T | ACT | K152V | GTG | N219C | TGT | E285Q | CAG | V351S | TCT |
| P021G | GGG | Q086V | GTG | K152W | TGG | N219D | GAT | E285R | CGT | V351W | TGG |
| P021H | CAT | Q086W | TGG | K152Y | TAT | N219E | GAG | E285S | AGT | V351Y | TAT |
| P021I | ATT | D087A | GCT | A153C | TGT | N219G | GGG | E285T | ACG | C352A | GCT |
| P021K | AAG | D087C | TGT | A153E | GAG | N219H | CAT | E285V | GTG | C352D | GAT |
| P021L | CTT | D087E | GAG | A153F | TTT | N219I | ATT | E285W | TGG | C352E | GAG |
| P021M | ATG | D087G | GGG | A153G | GGT | N219K | AAG | E285Y | TAT | C352F | TTT |
| P021R | CGT | D087H | CAT | A153H | CAT | N219L | CTT | L286A | GCG | C352G | GGG |
| P021S | TCT | D087I | ATT | A153I | ATT | N219M | ATG | L286C | TGT | C352K | AAG |
| P021T | ACG | D087L | CTG | A153K | AAG | N219P | CCT | L286D | GAT | C352M | ATG |
| P021V | GTT | D087M | ATG | A153L | CTG | N219R | CGT | L286E | GAG | C352P | CCT |
| P021W | TGG | D087P | CCT | A153M | ATG | N219S | TCG | L286F | TTT | C352Q | CAG |
| S022A | GCT | D087Q | CAG | A153P | CCT | N219T | ACT | L286G | GGT | C352R | CGT |
| S022C | TGT | D087R | AGG | A153Q | CAG | N219W | TGG | L286H | CAT | C352S | AGT |
| S022D | GAT | D087S | TCG | A153R | CGT | E220A | GCG | L286K | AAG | C352T | ACT |
| S022E | GAG | D087T | ACT | A153S | AGT | E220D | GAT | L286M | ATG | C352V | GTG |
| S022G | GGG | D087V | GTT | A153T | ACT | E220G | GGG | L286P | CCT | C352W | TGG |
| S022H | CAT | D087Y | TAT | A153V | GTG | E220H | CAT | L286R | AGG | C352Y | TAT |
| S022K | AAG | H088A | GCT | A153W | TGG | E220I | ATT | L286S | AGT | I353A | GCT |
| S022L | CTG | H088C | TGT | K154A | GCT | E220K | AAG | L286T | ACG | I353C | TGT |
| S022M | ATG | H088E | GAG | K154C | TGT | E220L | TTG | L286W | TGG | I353E | GAG |
| S022N | AAT | H088F | TTT | K154D | GAT | E220M | ATG | L286Y | TAT | I353F | TTT |
| S022P | CCG | H088G | GGG | K154E | GAG | E220N | AAT | V287A | GCT | I353G | GGG |
| S022R | CGG | H088I | ATT | K154G | GGT | E220P | CCG | V287C | TGT | I353H | CAT |
| S022T | ACT | H088K | AAG | K154H | CAT | E220R | CGG | V287D | GAT | I353K | AAG |
| S022V | GTG | H088L | TTG | K154I | ATT | E220S | TCT | V287E | GAG | I353L | CTT |
| S022Y | TAT | H088M | ATG | K154L | CTG | E220T | ACG | V287F | TTT | I353M | ATG |
| E023A | GCT | H088P | CCT | K154P | CCT | E220V | GTG | V287G | GGG | I353Q | CAG |
| E023D | GAT | H088R | CGT | K154R | CGG | E220W | TGG | V287I | ATT | I353R | CGT |
| E023F | TTT | H088S | AGT | K154S | AGT | S221A | GCG | V287K | AAG | I353S | TCG |
| E023G | GGG | H088T | ACT | K154T | ACT | S221C | TGT | V287L | CTT | I353T | ACT |
| E023H | CAT | H088V | GTT | K154V | GTG | S221D | GAT | V287N | AAT | I353V | GTG |
| E023L | CTT | H088Y | TAT | K154W | TGG | S221E | GAG | V287P | CCT | I353W | TGG |
| E023M | ATG | L089A | GCT | K154Y | TAT | S221G | GGG | V287Q | CAG | R354C | TGT |
| E023N | AAT | L089C | TGT | Q155A | GCT | S221H | CAT | V287R | CGG | R354D | GAT |
| E023P | CCT | L089D | GAT | Q155C | TGT | S221I | ATT | V287S | TCT | R354E | GAG |
| E023Q | CAG | L089E | GAG | Q155D | GAT | S221K | AAG | V287T | ACT | R354G | GGT |
| E023R | CGG | L089G | GGG | Q155F | TTT | S221L | TTG | Y288D | GAC | R354H | CAT |
| E023S | TCT | L089K | AAG | Q155G | GGG | S221M | ATG | Y288E | GAG | R354I | ATT |
| E023T | ACG | L089M | ATG | Q155H | CAT | S221P | CCG | Y288F | TTT | R354K | AAG |
| E023V | GTG | L089N | AAT | Q155K | AAG | S221Q | CAG | Y288G | GGG | R354L | CTT |
| E023W | TGG | L089P | CCT | Q155L | CTT | S221R | CGG | Y288H | CAT | R354M | ATG |
| F024A | GCG | L089Q | CAG | Q155M | ATG | S221T | ACT | Y288I | ATT | R354P | CCT |
| F024C | TGT | L089R | AGG | Q155P | CCT | S221V | GTG | Y288K | AAG | R354Q | CAG |
| F024E | GAG | L089S | TCG | Q155R | CGG | T222A | GCG | Y288L | CTG | R354S | TCT |
| F024G | GGG | L089T | ACT | Q155S | AGT | T222D | GAT | Y288P | CCT | R354V | GTG |
| F024H | CAT | L089W | TGG | Q155T | ACT | T222E | GAG | Y288Q | CAG | R354W | TGG |
| F024I | ATT | L089Y | TAT | Q155V | GTT | T222F | TTT | Y288R | CGT | R354Y | TAT |
| F024K | AAG | D090A | GCT | Q155W | TGG | T222G | GGG | Y288S | TCT | K355D | GAT |
| F024L | TTG | D090C | TGT | Q155Y | TAT | T222I | ATT | Y288T | ACT | K355F | TTT |
| F024M | ATG | D090E | GAG | E156A | GCT | T222K | AAA | Y288V | GTG | K355G | GGG |
| F024N | AAT | D090G | GGG | E156C | TGT | T222L | TTG | Y288W | TGG | K355H | CAT |
| F024P | CCT | D090H | CAT | E156D | GAT | T222N | AAT | T289A | GCT | K355L | CTG |
| F024R | CGT | D090I | ATT | E156G | GGT | T222P | CCG | T289C | TGT | K355M | ATG |
| F024T | ACG | D090K | AAG | E156I | ATT | T222R | CGG | T289E | GAG | K355N | AAT |
| F024V | GTT | D090L | CTT | E156K | AAG | T222S | AGT | T289G | GGT | K355P | CCT |
| F024Y | TAT | D090N | AAT | E156L | CTG | T222V | GTT | T289H | CAT | K355Q | CAG |
| C025D | GAT | D090P | CCT | E156M | ATG | T222W | TGG | T289K | AAG | K355R | CGT |
| C025E | GAG | D090Q | CAG | E156P | CCT | T222Y | TAT | T289L | CTT | K355S | TCT |
| C025F | TTT | D090R | AGG | E156Q | CAG | A223C | TGT | T289M | ATG | K355T | ACT |
| C025G | GGG | D090S | AGT | E156R | CGG | A223D | GAT | T289N | AAT | K355V | GTG |
| C025H | CAT | D090T | ACT | E156S | TCT | A223E | GAG | T289P | CCT | K355W | TGG |
| C025I | ATT | D090W | TGG | E156T | ACT | A223G | GGG | T289Q | CAG | K355Y | TAT |
| C025K | AAG | K091A | GCT | E156V | GTT | A223H | CAT | T289R | AGG | N356A | GCT |
| C025L | TTG | K091D | GAT | E156W | TGG | A223K | AAG | T289S | TCG | N356C | TGT |
| C025N | AAT | K091E | GAG | F157A | GCT | A223L | CTG | T289V | GTG | N356D | GAT |
| C025P | CCT | K091F | TTT | F157C | TGT | A223P | CCT | T289Y | TAT | N356F | TTT |
| C025R | CGT | K091G | GGG | F157D | GAT | A223Q | CAG | F290A | GCT | N356G | GGG |
| C025S | TCT | K091H | CAT | F157E | GAG | A223R | AGG | F290C | TGT | N356H | CAT |
| C025T | ACT | K091I | ATT | F157G | GGT | A223S | TCT | F290D | GAT | N356K | AAG |
| C025V | GTG | K091L | TTG | F157H | CAT | A223T | ACG | F290G | GGG | N356L | CTG |
| C025Y | TAT | K091N | AAT | F157I | ATT | A223V | GTG | F290H | CAT | N356P | CCT |
| L026A | GCT | K091Q | CAG | F157K | AAG | A223W | TGG | F290I | ATT | N356Q | CAG |
| L026E | GAG | K091R | CGT | F157L | TTG | A223Y | TAT | F290K | AAG | N356R | CGG |
| L026G | GGT | K091S | TCT | F157M | ATG | L224A | GCT | F290L | TTG | N356S | AGT |
| L026H | CAT | K091T | ACT | F157P | CCT | L224D | GAT | F290M | ATG | N356T | ACT |
| L026I | ATT | K091Y | TAT | F157Q | CAG | L224E | GAG | F290Q | CAG | N356V | GTG |
| L026K | AAG | A092C | TGT | F157R | CGG | L224F | TTT | F290R | AGG | N356W | TGG |
| L026M | ATG | A092E | GAG | F157S | TCG | L224G | GGG | F290S | TCG | W357A | GCT |
| L026P | CCG | A092F | TTT | F157T | ACT | L224I | ATT | F290T | ACT | W357C | TGT |
| L026Q | CAG | A092G | GGT | F157V | GTG | L224M | ATG | F290V | GTT | W357D | GAT |
| L026R | CGG | A092H | CAT | F157W | TGG | L224P | CCG | F290Y | TAT | W357E | GAG |
| L026S | TCT | A092K | AAG | E158A | GCT | L224Q | CAG | G291A | GCT | W357F | TTT |
| L026T | ACT | A092L | CTG | E158C | TGT | L224R | AGG | G291C | TGT | W357G | GGG |
| L026V | GTT | A092M | ATG | E158D | GAT | L224S | AGT | G291D | GAT | W357K | AAG |
| L026W | TGG | A092P | CCT | E158F | TTT | L224T | ACT | G291E | GAG | W357L | TTG |
| L026Y | TAT | A092Q | CAG | E158G | GGG | L224V | GTT | G291F | TTT | W357M | ATG |
| G027A | GCT | A092R | CGT | E158H | CAT | L224W | TGG | G291H | CAT | W357P | CCT |
| G027C | TGT | A092T | ACT | E158K | AAG | L224Y | TAT | G291L | CTG | W357Q | CAG |
| G027D | GAT | A092V | GTT | E158L | CTG | Y225A | GCG | G291M | ATG | W357R | CGT |
| G027E | GAG | A092W | TGG | E158N | AAT | Y225D | GAT | G291N | AAT | W357S | AGT |
| G027F | TTT | A092Y | TAT | E158P | CCT | Y225E | GAG | G291P | CCT | W357T | ACT |
| G027H | CAT | K093D | GAT | E158Q | CAG | Y225G | GGT | G291Q | CAG | W357V | GTG |
| G027I | ATT | K093E | GAG | E158R | CGG | Y225H | CAT | G291R | CGG | N358C | TGT |
| G027K | AAG | K093F | TTT | E158S | TCG | Y225K | AAG | G291S | TCT | N358D | GAT |
| G027L | CTG | K093G | GGT | E158V | GTG | Y225L | CTG | G291T | ACT | N358E | GAG |
| G027P | CCT | K093H | CAT | E158Y | TAT | Y225P | CCG | G291V | GTG | N358G | GGG |
| G027Q | CAG | K093I | ATT | K159A | GCT | Y225Q | CAG | G291W | TGG | N358H | CAT |
| G027R | CGG | K093L | CTG | K159D | GAT | Y225R | AGG | G291Y | TAT | N358I | ATT |
| G027S | TCG | K093M | ATG | K159E | GAG | Y225S | TCT | E292A | GCT | N358K | AAG |
| G027T | ACT | K093N | AAT | K159F | TTT | Y225T | ACG | E292C | TGT | N358L | CTG |
| G027W | TGG | K093P | CCT | K159G | GGT | Y225V | GTG | E292F | TTT | N358P | CCT |
| K028A | GCG | K093Q | CAG | K159H | CAT | Y225W | TGG | E292G | GGT | N358Q | CAG |
| K028D | GAT | K093R | CGG | K159L | CTT | P226A | GCG | E292H | CAT | N358R | CGT |
| K028E | GAG | K093S | AGT | K159M | ATG | P226C | TGT | E292I | ATT | N358S | TCT |
| K028F | TTT | K093T | ACT | K159N | AAT | P226D | GAT | E292K | AAG | N358T | ACT |
| K028G | GGG | K093V | GTT | K159Q | CAG | P226E | GAG | E292L | TTG | N358V | GTG |
| K028I | ATT | K094A | GCT | K159R | CGG | P226F | TTT | E292N | AAT | N358W | TGG |
| K028L | TTG | K094C | TGT | K159S | TCT | P226G | GGT | E292P | CCT | S359A | GCT |
| K028M | ATG | K094D | GAT | K159V | GTG | P226L | CTT | E292Q | CAG | S359C | TGT |
| K028N | AAT | K094E | GAG | K159W | TGG | P226N | AAT | E292R | CGG | S359D | GAT |
| K028P | CCT | K094F | TTT | K159Y | TAT | P226Q | CAG | E292T | ACT | S359E | GAG |
| K028R | CGG | K094G | GGG | A160C | TGT | P226R | AGG | E292V | GTT | S359F | TTT |
| K028S | AGT | K094H | CAT | A160F | TTT | P226S | TCT | E292W | TGG | S359G | GGG |
| K028T | ACT | K094L | TTG | A160G | GGG | P226T | ACG | T293A | GCT | S359H | CAT |
| K028V | GTT | K094M | ATG | A160H | CAT | P226V | GTT | T293C | TGT | S359K | AAG |
| K028W | TGG | K094N | AAT | A160I | ATT | P226W | TGG | T293D | GAT | S359L | TTG |
| F029A | GCT | K094P | CCT | A160K | AAG | P226Y | TAT | T293E | GAG | S359M | ATG |
| F029C | TGT | K094Q | CAG | A160L | CTG | S227A | GCT | T293F | TTT | S359P | CCT |
| F029E | GAG | K094R | AGG | A160M | ATG | S227F | TTT | T293G | GGT | S359R | CGG |
| F029G | GGG | K094S | TCT | A160N | AAT | S227G | GGG | T293K | AAG | S359T | ACT |
| F029H | CAT | K094T | ACT | A160Q | CAG | S227H | CAT | T293L | CTT | S359V | GTT |
| F029I | ATT | D095A | GCT | A160R | AGG | S227I | ATT | T293M | ATG | S359W | TGG |
| F029K | AAG | D095C | TGT | A160S | AGT | S227K | AAG | T293N | AAT | S360A | GCT |
| F029L | CTT | D095E | GAG | A160V | GTG | S227L | TTG | T293P | CCT | S360C | TGT |
| F029M | ATG | D095F | TTT | A160W | TGG | S227M | ATG | T293Q | CAG | S360E | GAG |
| F029P | CCG | D095G | GGG | A160Y | TAT | S227P | CCT | T293S | TCT | S360F | TTT |
| F029R | CGG | D095H | CAT | G161A | GCT | S227Q | CAG | T293V | GTG | S360G | GGG |
| F029S | TCG | D095K | AAG | G161C | TGT | S227R | CGG | T293Y | TAT | S360I | ATT |
| F029T | ACG | D095L | TTG | G161D | GAT | S227T | ACG | V294A | GCT | S360K | AAG |
| F029V | GTG | D095M | ATG | G161E | GAG | S227V | GTG | V294C | TGT | S360L | CTG |
| F029W | TGG | D095P | CCT | G161H | CAT | S227W | TGG | V294E | GAG | S360M | ATG |
| D030A | GCG | D095Q | CAG | G161I | ATT | S227Y | TAT | V294G | GGG | S360N | AAT |
| D030E | GAG | D095S | TCT | G161K | AAG | I228A | GCG | V294H | CAT | S360P | CCT |
| D030F | TTT | D095V | GTG | G161L | CTT | I228E | GAG | V294K | AAG | S360Q | CAG |
| D030G | GGG | D095W | TGG | G161M | ATG | I228F | TTT | V294L | TTG | S360R | AGG |
| D030H | CAT | D095Y | TAT | G161Q | CAG | I228G | GGG | V294M | ATG | S360T | ACT |
| D030K | AAG | I096A | GCT | G161R | CGT | I228H | CAT | V294N | AAT | S360V | GTT |
| D030L | TTG | I096C | TGT | G161S | AGT | I228K | AAG | V294P | CCT | D361A | GCT |
| D030M | ATG | I096D | GAT | G161T | ACT | I228L | TTG | V294Q | CAG | D361C | TGT |
| D030P | CCT | I096E | GAG | G161V | GTG | I228M | ATG | V294R | AGG | D361E | GAG |
| D030Q | CAG | I096F | TTT | G161W | TGG | I228N | AAT | V294S | AGT | D361G | GGG |
| D030R | CGG | I096G | GGG | K162A | GCT | I228P | CCG | V294T | ACT | D361H | CAT |
| D030S | TCG | I096H | CAT | K162D | GAT | I228Q | CAG | V294W | TGG | D361L | TTG |
| D030T | ACT | I096L | TTG | K162E | GAG | I228R | CGT | A295C | TGT | D361M | ATG |
| D030V | GTT | I096N | AAT | K162F | TTT | I228S | TCT | A295D | GAT | D361N | AAT |
| D030W | TGG | I096P | CCT | K162G | GGG | I228T | ACT | A295E | GAG | D361P | CCT |
| E031A | GCG | I096R | CGT | K162H | CAT | I228W | TGG | A295F | TTT | D361Q | CAG |
| E031C | TGT | I096S | AGT | K162L | TTG | Y229E | GAG | A295G | GGG | D361R | AGG |
| E031G | GGG | I096T | ACT | K162M | ATG | Y229F | TTT | A295H | CAT | D361S | TCG |
| E031H | CAT | I096V | GTG | K162P | CCT | Y229G | GGT | A295I | ATT | D361V | GTT |
| E031I | ATT | I096W | TGG | K162Q | CAG | Y229H | CAT | A295L | CTG | D361W | TGG |
| E031K | AAG | T097A | GCT | K162R | CGG | Y229I | ATT | A295N | AAT | D361Y | TAT |
| E031L | CTG | T097C | TGT | K162S | TCG | Y229K | AAG | A295P | CCT | Y362A | GCT |
| E031N | AAC | T097D | GAT | K162V | GTG | Y229L | TTG | A295Q | CAG | Y362C | TGT |
| E031P | CCG | T097E | GAG | K162W | TGG | Y229N | AAT | A295S | AGT | Y362E | GAG |
| E031R | CGG | T097F | TTT | K162Y | TAT | Y229P | CCT | A295T | ACT | Y362G | GGG |
| E031S | TCT | T097G | GGG | D163A | GCT | Y229Q | CAG | A295V | GTT | Y362H | CAT |
| E031T | ACG | T097I | ATT | D163C | TGT | Y229R | CGT | A295Y | TAT | Y362K | AAG |
| E031V | GTG | T097L | CTT | D163E | GAG | Y229S | TCG | L296A | GCT | Y362L | CTT |
| E031W | TGG | T097N | AAT | D163F | TTT | Y229T | ACT | L296C | TGT | Y362M | ATG |
| E031Y | TAT | T097P | CCT | D163G | GGG | Y229V | GTG | L296F | TTT | Y362N | AAT |
| P032A | GCG | T097Q | CAG | D163H | CAC | Y229W | TGG | L296G | GGT | Y362P | CCT |
| P032C | TGT | T097R | CGG | D163K | AAG | L230A | GCG | L296I | ATT | Y362R | CGG |
| P032F | TTT | T097S | TCG | D163L | CTT | L230E | GAG | L296K | AAG | Y362S | AGT |
| P032G | GGG | T097W | TGG | D163P | CCT | L230G | GGG | L296M | ATG | Y362T | ACT |
| P032H | CAT | T097Y | TAT | D163Q | CAG | L230H | CAT | L296P | CCT | Y362V | GTG |
| P032K | AAG | F098A | GCT | D163R | AGG | L230I | ATT | L296Q | CAG | Y362W | TGG |
| P032L | CTG | F098C | TGT | D163S | TCG | L230K | AAG | L296R | CGT | L363A | GCT |
| P032M | ATG | F098D | GAT | D163T | ACT | L230M | ATG | L296S | TCG | L363C | TGT |
| P032N | AAT | F098E | GAG | D163V | GTG | L230N | AAT | L296T | ACT | L363D | GAT |
| P032Q | CAG | F098G | GGG | D163W | TGG | L230P | CCT | L296V | GTT | L363E | GAG |
| P032R | CGG | F098H | CAT | F164A | GCT | L230R | CGT | L296W | TGG | L363F | TTT |
| P032S | TCG | F098I | ATT | F164C | TGT | L230S | AGT | L296Y | TAT | L363G | GGG |
| P032T | ACT | F098L | TTG | F164D | GAT | L230T | ACT | G297A | GCT | L363H | CAT |
| P032V | GTG | F098M | ATG | F164E | GAG | L230V | GTT | G297C | TGT | L363I | ATT |
| P032W | TGG | F098P | CCT | F164G | GGG | L230W | TGG | G297E | GAG | L363P | CCT |
| P032Y | TAT | F098Q | CAG | F164H | CAT | L230Y | TAT | G297H | CAT | L363Q | CAG |
| L033C | TGT | F098R | CGT | F164L | TTG | N231A | GCT | G297I | ATT | L363R | CGG |
| L033D | GAT | F098S | TCG | F164M | ATG | N231C | TGT | G297L | CTT | L363S | TCG |
| L033G | GGG | F098V | GTT | F164N | AAT | N231D | GAT | G297N | AAT | L363T | ACT |
| L033H | CAT | F098W | TGG | F164P | CCT | N231F | TTT | G297P | CCT | L363V | GTG |
| L033I | ATT | Y099A | GCT | F164Q | CAG | N231G | GGG | G297Q | CAG | L363W | TGG |
| L033M | ATG | Y099C | TGT | F164R | CGG | N231H | CAT | G297R | CGG | H364A | GCT |
| L033N | AAT | Y099E | GAG | F164S | AGT | N231I | ATT | G297S | AGT | H364C | TGT |
| L033P | CCG | Y099F | TTT | F164V | GTT | N231K | AAG | G297T | ACT | H364D | GAT |
| L033Q | CAG | Y099G | GGT | F164W | TGG | N231L | CTT | G297V | GTG | H364E | GAG |
| L033R | AGG | Y099I | ATT | L165A | GCT | N231P | CCT | G297W | TGG | H364F | TTT |
| L033S | TCG | Y099L | TTG | L165C | TGT | N231Q | CAG | G297Y | TAT | H364G | GGG |
| L033T | ACT | Y099N | AAT | L165D | GAT | N231R | CGT | A298C | TGT | H364K | AAG |
| L033V | GTT | Y099P | CCT | L165F | TTT | N231S | TCT | A298E | GAG | H364L | CTG |
| L033W | TGG | Y099Q | CAG | L165G | GGG | N231T | ACG | A298G | GGG | H364M | ATG |
| L033Y | TAT | Y099R | AGG | L165H | CAT | N231V | GTG | A298I | ATT | H364P | CCT |
| D034A | GCT | Y099S | TCG | L165N | AAT | T232A | GCG | A298L | TTG | H364R | CGG |
| D034E | GAG | Y099T | ACT | L165P | CCT | T232C | TGT | A298M | ATG | H364S | TCT |
| D034G | GGT | Y099V | GTT | L165Q | CAG | T232F | TTT | A298N | AAT | H364T | ACT |
| D034H | CAT | Y099W | TGG | L165R | CGG | T232G | GGG | A298P | CCT | H364V | GTG |
| D034I | ATT | M100C | TGT | L165S | TCG | T232H | CAT | A298Q | CAG | H364Y | TAT |
| D034K | AAG | M100E | GAG | L165T | ACT | T232K | AAG | A298R | CGT | L365A | GCT |
| D034L | CTT | M100F | TTT | L165V | GTG | T232L | CTT | A298S | TCG | L365C | TGT |
| D034N | AAT | M100G | GGT | L165W | TGG | T232M | ATG | A298T | ACT | L365D | GAT |
| D034P | CCT | M100K | AAG | L165Y | TAT | T232N | AAT | A298V | GTG | L365E | GAG |
| D034Q | CAG | M100L | CTG | V166A | GCT | T232P | CCG | A298W | TGG | L365G | GGG |
| D034R | CGT | M100N | AAT | V166C | TGT | T232Q | CAG | A298Y | TAT | L365I | ATT |
| D034S | AGT | M100P | CCT | V166D | GAT | T232R | AGG | S299A | GCT | L365M | ATG |
| D034T | ACG | M100Q | CAG | V166E | GAG | T232S | AGT | S299C | TGT | L365N | AAT |
| D034V | GTT | M100R | CGG | V166F | TTT | T232V | GTG | S299D | GAT | L365P | CCT |
| D034W | TGG | M100S | TCT | V166G | GGT | T232Y | TAT | S299E | GAG | L365Q | CAG |
| M035A | GCG | M100T | ACT | V166H | CAT | Q233A | GCG | S299F | TTT | L365R | CGG |
| M035D | GAT | M100V | GTT | V166L | CTT | Q233C | TGT | S299G | GGG | L365S | AGT |
| M035F | TTT | M100W | TGG | V166N | AAT | Q233D | GAT | S299H | CAT | L365T | ACT |
| M035G | GGG | M100Y | TAT | V166P | CCT | Q233F | TTT | S299I | ATT | L365V | GTG |
| M035H | CAT | P101A | GCT | V166Q | CAG | Q233G | GGG | S299L | CTT | L365W | TGG |
| M035I | ATT | P101C | TGT | V166R | CGG | Q233I | ATT | S299M | ATG | L365Y | TAT |
| M035L | TTG | P101F | TTT | V166T | ACT | Q233K | AAG | S299P | CCT | N366A | GCT |
| M035N | AAT | P101G | GGG | V166W | TGG | Q233L | CTG | S299Q | CAG | N366C | TGT |
| M035P | CCG | P101H | CAT | V166Y | TAT | Q233P | CCG | S299R | AGG | N366E | GAG |
| M035Q | CAG | P101I | ATT | E167A | GCT | Q233R | AGG | S299T | ACT | N366F | TTT |
| M035R | CGT | P101K | AAG | E167D | GAT | Q233S | TCG | S299Y | TAT | N366G | GGG |
| M035S | TCT | P101L | CTT | E167F | TTT | Q233T | ACG | G300A | GCT | N366K | AAG |
| M035T | ACT | P101M | ATG | E167G | GGT | Q233V | GTG | G300C | TGT | N366L | TTG |
| M035V | GTT | P101N | AAT | E167H | CAT | Q233W | TGG | G300D | GAT | N366M | ATG |
| M035Y | TAT | P101Q | CAG | E167K | AAG | Q233Y | TAT | G300E | GAG | N366P | CCT |
| S036A | GCG | P101R | AGG | E167L | TTG | Q234A | GCT | G300F | TTT | N366Q | CAG |
| S036C | TGT | P101S | TCT | E167M | ATG | Q234C | TGT | G300L | CTT | N366R | AGG |
| S036D | GAT | P101T | ACT | E167N | AAT | Q234D | GAT | G300M | ATG | N366S | TCT |
| S036F | TTT | P101Y | TAT | E167P | CCT | Q234E | GAG | G300N | AAT | N366T | ACT |
| S036G | GGT | V102A | GCT | E167R | AGG | Q234G | GGT | G300P | CCT | N366V | GTT |
| S036H | CAT | V102C | TGT | E167S | TCG | Q234H | CAT | G300Q | CAG | N366W | TGG |
| S036K | AAG | V102E | GAG | E167T | ACT | Q234L | CTT | G300R | AGG | P367A | GCT |
| S036L | TTG | V102G | GGT | E167V | GTT | Q234M | ATG | G300S | TCG | P367C | TGT |
| S036N | AAT | V102H | CAT | E167Y | TAT | Q234N | AAT | G300T | ACT | P367E | GAG |
| S036P | CCG | V102K | AAG | T168A | GCT | Q234P | CCG | G300V | GTT | P367F | TTT |
| S036R | CGG | V102L | TTG | T168C | TGT | Q234R | CGG | G300W | TGG | P367G | GGT |
| S036T | ACG | V102M | ATG | T168D | GAT | Q234S | AGT | I301A | GCT | P367H | CAT |
| S036V | GTT | V102N | AAT | T168E | GAG | Q234T | ACT | I301E | GAG | P367I | ATT |
| S036W | TGG | V102P | CCT | T168F | TTT | Q234V | GTG | I301G | GGG | P367K | AAG |
| S036Y | TAT | V102Q | CAG | T168G | GGG | Q234W | TGG | I301H | CAT | P367L | CTG |
| L037A | GCG | V102R | AGG | T168H | CAT | S235A | GCG | I301K | AAG | P367M | ATG |
| L037C | TGT | V102S | TCT | T168K | AAG | S235E | GAG | I301L | CTG | P367Q | CAG |
| L037E | GAG | V102T | ACT | T168L | CTG | S235F | TTT | I301M | ATG | P367R | CGT |
| L037F | TTT | V102W | TGG | T168P | CCT | S235G | GGG | I301N | AAT | P367S | TCG |
| L037G | GGG | D103A | GCT | T168R | CGG | S235H | CAT | I301P | CCT | P367V | GTT |
| L037I | ATT | D103E | GAG | T168S | TCT | S235K | AAG | I301Q | CAG | P367W | TGG |
| L037K | AAG | D103F | TTT | T168V | GTG | S235L | CTT | I301R | CGG | D368A | GCT |
| L037M | ATG | D103G | GGG | T168W | TGG | S235M | ATG | I301S | AGT | D368C | TGT |
| L037N | AAT | D103H | CAT | T168Y | TAT | S235P | CCT | I301V | GTT | D368E | GAG |
| L037P | CCT | D103I | ATT | I169A | GCT | S235Q | CAG | I301W | TGG | D368G | GGT |
| L037R | AGG | D103L | CTT | I169D | GAT | S235R | CGG | I301Y | TAT | D368H | CAT |
| L037S | TCT | D103N | AAT | I169F | TTT | S235T | ACG | V302C | TGT | D368K | AAG |
| L037T | ACG | D103Q | CAG | I169G | GGG | S235V | GTG | V302D | GAT | D368L | CTT |
| L037V | GTG | D103R | AGG | I169H | CAT | S235W | TGG | V302E | GAG | D368M | ATG |
| L037W | TGG | D103S | TCG | I169K | AAG | S235Y | TAT | V302F | TTT | D368P | CCT |
| F038A | GCG | D103T | ACT | I169L | TTG | P236A | GCT | V302G | GGT | D368R | CGT |
| F038C | TGT | D103V | GTT | I169N | AAT | P236C | TGT | V302H | CAT | D368S | AGT |
| F038E | GAG | D103W | TGG | I169P | CCT | P236E | GAG | V302I | ATT | D368T | ACT |
| F038G | GGG | D103Y | TAT | I169Q | CAG | P236G | GGG | V302L | TTG | D368V | GTT |
| F038K | AAG | N104A | GCT | I169R | CGG | P236H | CAT | V302M | ATG | D368W | TGG |
| F038L | CTT | N104C | TGT | I169S | TCG | P236I | ATT | V302P | CCT | D368Y | TAT |
| F038M | ATG | N104F | TTT | I169T | ACT | P236K | AAG | V302R | AGG | N369A | GCT |
| F038N | AAT | N104G | GGG | I169V | GTT | P236L | CTG | V302S | TCG | N369C | TGT |
| F038P | CCT | N104H | CAT | I169Y | TAT | P236N | AAT | V302T | ACT | N369E | GAG |
| F038Q | CAG | N104I | ATT | K170A | GCT | P236Q | CAG | V302W | TGG | N369F | TTT |
| F038R | AGG | N104K | AAG | K170C | TGT | P236R | CGT | V302Y | TAT | N369H | CAT |
| F038S | TCT | N104L | CTG | K170D | GAT | P236S | AGT | I303A | GCT | N369I | ATT |
| F038T | ACT | N104M | ATG | K170E | GAG | P236T | ACT | I303C | TGT | N369K | AAG |
| F038W | TGG | N104P | CCT | K170G | GGG | P236W | TGG | I303D | GAT | N369L | CTT |
| F038Y | TAT | N104R | AGG | K170I | ATT | P236Y | TAT | I303E | GAG | N369P | CCT |
| S039A | GCG | N104S | TCT | K170L | TTG | V237A | GCG | I303F | TTT | N369Q | CAG |
| S039C | TGT | N104T | ACT | K170M | ATG | V237C | TGT | I303G | GGT | N369R | CGG |
| S039D | GAT | N104V | GTT | K170N | AAT | V237E | GAG | I303K | AAG | N369S | TCG |
| S039F | TTT | N104W | TGG | K170P | CCT | V237F | TTT | I303L | TTG | N369T | ACT |
| S039G | GGT | L105A | GCT | K170Q | CAG | V237G | GGT | I303M | ATG | N369V | GTG |
| S039L | TTG | L105C | TGT | K170R | CGT | V237H | CAT | I303P | CCT | N369W | TGG |
| S039M | ATG | L105D | GAT | K170V | GTT | V237L | TTG | I303R | CGT | F370A | GCT |
| S039N | AAT | L105E | GAG | K170W | TGG | V237N | AAT | I303S | AGT | F370D | GAT |
| S039P | CCG | L105G | GGT | K170Y | TAT | V237P | CCT | I303V | GTG | F370E | GAG |
| S039Q | CAG | L105H | CAT | L171A | GCT | V237Q | CAG | I303W | TGG | F370G | GGG |
| S039R | CGT | L105I | ATT | L171C | TGT | V237R | CGG | I303Y | TAT | F370H | CAT |
| S039T | ACT | L105M | ATG | L171D | GAT | V237S | TCG | W304A | GCT | F370I | ATT |
| S039V | GTT | L105N | AAT | L171G | GGG | V237T | ACG | W304C | TGT | F370K | AAG |
| S039W | TGG | L105P | CCT | L171H | CAT | V237W | TGG | W304D | GAT | F370L | CTG |
| S039Y | TAT | L105Q | CAG | L171I | ATT | V237Y | TAT | W304G | GGT | F370N | AAT |
| F040A | GCG | L105R | CGG | L171M | ATG | A238D | GAT | W304I | ATT | F370P | CCT |
| F040D | GAT | L105S | TCT | L171N | AAT | A238E | GAG | W304L | CTG | F370Q | CAG |
| F040E | GAG | L105T | ACT | L171P | CCT | A238F | TTT | W304M | ATG | F370R | AGG |
| F040G | GGT | L105V | GTT | L171Q | CAG | A238G | GGT | W304N | AAT | F370S | TCT |
| F040I | ATT | L105W | TGG | L171R | CGT | A238H | CAT | W304P | CCT | F370V | GTG |
| F040K | AAG | G106A | GCT | L171S | AGT | A238K | AAG | W304Q | CAG | F370Y | TAT |
| F040L | CTG | G106C | TGT | L171V | GTG | A238L | CTT | W304R | CGG | A371C | TGT |
| F040N | AAT | G106D | GAT | L171W | TGG | A238P | CCG | W304S | AGT | A371E | GAG |
| F040Q | CAG | G106E | GAG | L171Y | TAT | A238Q | CAG | W304T | ACT | A371F | TTT |
| F040R | CGG | G106F | TTT | G172A | GCT | A238R | AGG | W304V | GTG | A371G | GGG |
| F040S | TCT | G106H | CAT | G172C | TGT | A238S | AGT | W304Y | TAT | A371H | CAT |
| F040T | ACT | G106I | ATT | G172D | GAT | A238T | ACG | G305C | TGT | A371I | ATT |
| F040V | GTT | G106L | CTG | G172E | GAG | A238V | GTG | G305D | GAT | A371K | AAG |
| F040W | TGG | G106M | ATG | G172I | ATT | A238W | TGG | G305E | GAG | A371L | CTT |
| F040Y | TAT | G106N | AAT | G172L | CTT | A238Y | TAT | G305F | TTT | A371M | ATG |
| I041A | GCG | G106P | CCT | G172M | ATG | A239C | TGT | G305H | CAT | A371P | CCT |
| I041C | TGT | G106S | AGT | G172P | CCT | A239F | TTT | G305K | AAG | A371R | CGT |
| I041D | GAT | G106V | GTG | G172Q | CAG | A239G | GGT | G305L | CTT | A371S | TCG |
| I041E | GAG | G106W | TGG | G172R | CGT | A239H | CAT | G305N | AAT | A371T | ACT |
| I041F | TTT | G106Y | TAT | G172S | TCT | A239I | ATT | G305P | CCT | A371V | GTG |
| I041G | GGG | M107A | GCT | G172T | ACT | A239K | AAG | G305Q | CAG | A371W | TGG |
| I041H | CAT | M107C | TGT | G172V | GTT | T240K | AAG | G305R | CGT | I372A | GCT |
| I041N | AAT | M107D | GAT | G172W | TGG | A239L | TTG | G305S | TCG | I372D | GAT |
| I041P | CCG | M107F | TTT | G172Y | TAT | A239N | AAT | G305T | ACT | I372E | GAG |
| I041Q | CAG | M107G | GGG | K173D | GAT | A239P | CCT | G305V | GTG | I372F | TTT |
| I041R | AGG | M107H | CAT | K173E | GAG | A239R | AGG | G305Y | TAT | I372G | GGT |
| I041S | TCT | M107I | ATT | K173G | GGG | A239S | TCT | T306A | GCT | I372H | CAT |
| I041T | ACG | M107K | AAG | K173H | CAT | A239T | ACT | T306C | TGT | I372K | AAG |
| I041V | GTT | M107L | CTT | K173I | ATT | A239V | GTT | T306D | GAT | I372L | CTG |
| I041W | TGG | M107P | CCT | K173L | CTT | A239W | TGG | T306E | GAG | I372N | AAT |
| G042A | GCT | M107Q | CAG | K173M | ATG | A239Y | TAT | T306F | TTT | I372P | CCT |
| G042C | TGT | M107R | CGT | K173N | AAT | T240A | GCG | T306G | GGT | I372R | CGG |
| G042D | GAT | M107S | TCT | K173P | CCT | T240E | GAG | T306H | CAT | I372S | TCT |
| G042E | GAG | M107V | GTT | K173Q | CAG | T240F | TTT | T306I | ATT | I372T | ACT |
| G042H | CAT | M107W | TGG | K173R | CGG | T240G | GGG | T306L | CTG | I372V | GTG |
| G042I | ATT | A108D | GAT | K173S | TCG | T240L | CTT | T306P | CCT | I372W | TGG |
| G042K | AAG | A108E | GAG | K173V | GTG | T240M | ATG | T306R | AGG | Q373A | GCT |
| G042L | CTG | A108F | TTT | K173W | TGG | T240N | AAT | T306S | AGT | Q373C | TGT |
| G042M | ATG | A108G | GGT | K173Y | TAT | T240P | CCT | T306V | GTG | Q373E | GAG |
| G042P | CCT | A108H | CAT | L174A | GCT | T240Q | CAG | T306W | TGG | Q373F | TTT |
| G042Q | CAG | A108K | AAG | L174C | TGT | T240R | CGT | T306Y | TAT | Q373G | GGT |
| G042R | CGG | A108L | TTG | L174G | GGG | T240S | AGT | L307C | TGT | Q373H | CAT |
| G042S | TCT | A108M | ATG | L174H | CAT | T240V | GTG | L307E | GAG | Q373K | AAG |
| G042T | ACT | A108N | AAT | L174K | AAG | T240W | TGG | L307F | TTT | Q373L | CTG |
| G042V | GTT | A108P | CCT | L174M | ATG | T240Y | TAT | L307G | GGG | Q373M | ATG |
| S043A | GCG | A108Q | CAG | L174N | AAT | L241A | GCG | L307I | ATT | Q373N | AAT |
| S043D | GAT | A108R | CGG | L174P | CCT | L241C | TGT | L307K | AAG | Q373P | CCT |
| S043E | GAG | A108S | TCT | L174Q | CAG | L241D | GAT | L307N | AAT | Q373R | CGT |
| S043F | TTT | A108T | ACT | L174R | CGT | L241E | GAG | L307P | CCT | Q373S | TCT |
| S043G | GGT | A108V | GTG | L174S | TCG | L241F | TTT | L307Q | CAG | Q373T | ACT |
| S043H | CAT | A108Y | TAT | L174T | ACT | L241G | GGG | L307R | AGG | Q373V | GTT |
| S043I | ATT | V109A | GCT | L174V | GTT | L241I | ATT | L307S | AGT | Q373W | TGG |
| S043K | AAG | V109C | TGT | L174W | TGG | L241K | AAG | L307T | ACT | L374A | GCT |
| S043L | CTT | V109D | GAT | L174Y | TAT | L241P | CCT | L307V | GTG | L374D | GAT |
| S043N | AAT | V109E | GAG | L175C | TGT | L241Q | CAG | L307W | TGG | L374E | GAG |
| S043P | CCT | V109F | TTT | L175D | GAT | L241R | CGG | L307Y | TAT | L374G | GGT |
| S043Q | CAG | V109G | GGG | L175E | GAG | L241S | TCT | S308C | TGT | L374H | CAT |
| S043R | CGG | V109H | CAT | L175F | TTT | L241T | ACG | S308D | GAT | L374I | ATT |
| S043T | ACT | V109L | TTG | L175G | GGG | L241V | GTT | S308F | TTT | L374M | ATG |
| S043V | GTG | V109M | ATG | L175H | CAT | L241W | TGG | S308G | GGT | L374N | AAT |
| P044A | GCT | V109P | CCT | L175K | AAG | Y242A | GCG | S308H | CAT | L374P | CCT |
| P044C | TGT | V109Q | CAG | L175N | AAT | Y242C | TGT | S308K | AAG | L374R | AGG |
| P044E | GAG | V109R | AGG | L175P | CCT | Y242D | GAT | S308L | CTG | L374S | AGT |
| P044F | TTT | V109T | ACT | L175R | CGT | Y242F | TTT | S308M | ATG | L374T | ACT |
| P044G | GGG | V109W | TGG | L175S | TCT | Y242G | GGT | S308N | AAT | L374V | GTG |
| P044H | CAT | V109Y | TAT | L175T | ACT | Y242I | ATT | S308P | CCT | L374W | TGG |
| P044I | ATT | I110A | GCT | L175V | GTG | Y242K | AAG | S308R | CGG | L374Y | TAT |
| P044L | CTT | I110C | TGT | L175W | TGG | Y242L | CTT | S308T | ACT | E375A | GCT |
| P044N | AAT | I110D | GAT | L175Y | TAT | Y242M | ATG | S308V | GTT | E375C | TGT |
| P044Q | CAG | I110F | TTT | R176A | GCT | Y242P | CCG | S308W | TGG | E375F | TTT |
| P044R | CGT | I110G | GGG | R176C | TGT | Y242R | CGG | S308Y | TAT | E375G | GGT |
| P044S | TCT | I110H | CAT | R176E | GAG | Y242S | TCT | I309D | GAT | E375I | ATT |
| P044T | ACT | I110K | AAG | R176F | TTT | Y242T | ACG | I309E | GAG | E375K | AAG |
| P044W | TGG | I110L | CTG | R176G | GGG | Y242V | GTT | I309G | GGT | E375L | CTT |
| P044Y | ACG | I110M | ATG | R176H | CAT | Y242W | TGG | I309H | CAT | E375M | ATG |
| R045A | GCG | I110N | AAT | R176I | ATT | V243A | GCG | I309K | AAG | E375N | AAT |
| R045D | GAT | I110P | CCT | R176K | AAG | V243C | TGT | I309L | CTG | E375P | CCT |
| R045F | TTT | I110R | CGT | R176L | CTT | V243D | GAT | I309M | ATG | E375R | CGT |
| R045G | GGG | I110S | AGT | R176P | CCT | V243F | TTT | I309N | AAT | E375S | TCT |
| R045H | CAT | I110V | GTT | R176Q | CAG | V243G | GGG | I309Q | CAG | E375T | ACT |
| R045I | ATT | I110W | TGG | R176S | AGT | V243H | CAT | I309R | CGT | E375V | GTT |
| R045K | AAG | D111C | TGT | R176T | ACT | V243L | CTT | I309S | AGT | E375Y | TAT |
| R045M | ATG | D111E | GAG | R176V | GTG | V243M | ATG | I309T | ACT | K376A | GCT |
| R045P | CCT | D111G | GGT | R176W | TGG | V243P | CCT | I309V | GTG | K376D | GAT |
| R045Q | CAG | D111H | CAT | P177A | GCT | V243Q | CAG | I309W | TGG | K376E | GAG |
| R045S | TCG | D111I | ATT | P177C | TGT | V243R | AGG | I309Y | TAT | K376G | GGG |
| R045T | ACG | D111K | AAG | P177D | GAT | V243S | AGT | M310A | GCT | K376I | ATT |
| R045V | GTG | D111L | TTG | P177F | TTT | V243T | ACG | M310C | TGT | K376L | TTG |
| R045W | TGG | D111M | ATG | P177G | GGG | V243W | TGG | M310E | GAG | K376M | ATG |
| R045Y | TAT | D111P | ACT | P177H | CAT | V243Y | TAT | M310F | TTT | K376P | CCT |
| I046A | GCG | D111Q | CAG | P177L | CTT | R244A | GCG | M310G | GGG | K376Q | CAG |
| I046C | TGT | D111R | CGG | P177M | ATG | R244D | GAT | M310K | AAG | K376R | CGT |
| I046E | GAG | D111S | AGT | P177Q | CAG | R244G | GGG | M310L | CTG | K376S | AGT |
| I046F | TTT | D111T | ACT | P177R | CGG | R244H | CAT | M310N | AAT | K376T | ACT |
| I046H | CAT | D111V | GTT | P177S | TCT | R244I | ATT | M310P | CCT | K376V | GTG |
| I046L | CTT | D111W | TGG | P177T | ACT | R244K | AAG | M310Q | CAG | K376W | TGG |
| I046M | ATG | D111Y | TAT | P177V | GTT | R244M | ATG | M310R | CGG | K376Y | TAT |
| I046N | AAT | W112C | TGT | P177W | TGG | R244N | AAT | M310S | AGT | G377C | TGT |
| I046P | CCT | W112D | GAT | P177Y | TAT | R244P | CCT | M310V | GTG | G377D | GAT |
| I046R | CGT | W112E | GAG | N178A | GCT | R244Q | CAG | M310W | TGG | G377E | GAG |
| I046S | TCT | W112F | TTT | N178D | GAT | R244S | TCT | M310Y | TAT | G377F | TTT |
| I046T | ACT | W112G | GGG | N178E | GAG | R244T | ACG | R311A | GCT | G377H | CAT |
| I046V | GTT | W112H | CAT | N178G | GGG | R244V | GTG | R311C | TGT | G377I | ATT |
| I046W | TGG | W112I | ATT | N178I | ATT | R244W | TGG | R311E | GAG | G377K | AAG |
| I046Y | TAT | W112L | CTT | N178K | AAG | R244Y | TAT | R311F | TTT | G377L | CTT |
| N047A | GCT | W112N | AAT | N178L | TTG | N245A | GCG | R311G | GGT | G377M | ATG |
| N047D | GAT | W112P | CCT | N178M | ATG | N245C | TGT | R311H | CAT | G377P | CCT |
| N047F | TTT | W112Q | CAG | N178P | CCT | N245F | TTT | R311I | ATT | G377R | AGG |
| N047G | GGG | W112R | CGT | N178R | CGG | N245G | GGG | R311K | AAG | G377S | TCG |
| N047H | CAT | W112S | TCT | N178S | AGT | N245H | CAT | R311L | TTG | G377T | ACT |
| N047I | ATT | W112V | GTT | N178T | ACT | N245I | ATT | R311P | CCT | G377V | GTG |
| N047K | AAG | W112Y | TAT | N178V | GTG | N245K | AAG | R311Q | CAG | G377Y | TAT |
| N047L | CTT | E113A | GCT | N178W | TGG | N245L | CTG | R311S | TCT | G378D | GAT |
| N047M | ATG | E113C | TGT | N178Y | TAT | N245P | CCG | R311T | ACT | G378E | GAG |
| N047P | CCT | E113D | GAT | H179A | GCT | N245Q | CAG | R311V | GTG | G378F | TTT |
| N047Q | CAG | E113F | TTT | H179C | TGT | N245R | CGG | R311W | TGG | G378I | ATT |
| N047R | CGG | E113G | GGG | H179E | GAG | N245S | TCG | S312A | GCT | G378K | AAG |
| N047S | TCT | E113H | CAT | H179G | GGG | N245T | ACG | S312C | TGT | G378L | CTG |
| N047T | ACG | E113L | CTT | H179I | ATT | N245V | GTG | S312E | GAG | G378M | ATG |
| N047V | GTG | E113P | CCT | H179K | AAG | N245W | TGG | S312F | TTT | G378N | AAT |
| N047W | TGG | E113Q | CAG | H179L | CTG | R246A | GCG | S312G | GGG | G378Q | CAG |
| N047Y | TAT | E113R | CGT | H179M | ATG | R246C | TGT | S312H | CAT | G378R | AGG |
| A048C | TGT | E113S | TCT | H179N | AAT | R246D | GAT | S312K | AAG | G378S | TCT |
| A048E | GAG | E113T | ACT | H179P | CCT | R246E | GAG | S312L | CTG | G378T | ACT |
| A048F | TTT | E113V | GTT | H179R | AGG | R246G | GGG | S312M | ATG | G378V | GTG |
| A048G | GGT | E113W | TGG | H179S | AGT | R246H | CAT | S312N | AAT | G378W | TGG |
| A048H | CAT | E113Y | CAT | H179T | ACT | R246I | ATT | S312P | CCT | G378Y | TAT |
| A048I | ATT | E114A | GCT | H179V | GTG | R246K | AAG | S312Q | CAG | K379A | GCT |
| A048K | AAG | E114C | TGT | H179W | TGG | R246L | TTG | S312R | CGG | K379C | TGT |
| A048L | CTG | E114D | GAT | L180A | GCT | R246M | ATG | S312T | ACT | K379E | GAG |
| A048M | ATG | E114G | GGG | L180C | TGT | R246P | CCT | S312V | GTT | K379F | TTT |
| A048N | AAT | E114H | CAT | L180E | GAG | R246S | AGT | S312W | TGG | K379G | GGG |
| A048P | CCT | E114I | ATT | L180F | TTT | R246T | ACG | M313A | GCT | K379H | CAT |
| A048Q | CAG | E114L | CTG | L180G | GGT | R246V | GTT | M313C | TGT | K379I | ATT |
| A048R | CGG | E114M | ATG | L180H | CAT | R246W | TGG | M313D | GAT | K379L | CTT |
| A048S | TCT | E114P | CCT | L180I | ATT | V247A | GCG | M313E | GAG | K379M | ATG |
| A048V | GTT | E114R | CGG | L180K | AAG | V247C | TGT | M313F | TTT | K379N | AAT |
| A048W | TGG | E114S | TCT | L180M | ATG | V247F | TTT | M313G | GGG | K379R | CGT |
| A048Y | TAT | E114T | ACT | L180N | AAT | V247H | CAT | M313H | CAT | K379S | TCT |
| T049A | GCG | E114V | GTG | L180P | CCT | V247I | ATT | M313K | AAG | K379T | ACT |
| T049C | TGT | E114W | TGG | L180R | AGG | V247L | CTG | M313L | CTT | K379V | GTT |
| T049D | GAT | E114Y | TAT | L180S | TCG | V247M | ATG | M313P | CCT | K379W | TGG |
| T049F | TTT | W115A | GCT | L180T | ACT | V247N | AAT | M313R | CGT | F380A | GCT |
| T049G | GGG | W115C | TGT | L180W | TGG | V247P | CCT | M313S | TCG | F380C | TGT |
| T049H | CAT | W115D | GAT | W181A | GCT | V247Q | CAG | M313T | ACT | F380D | GAT |
| T049I | ATT | W115F | TTT | W181C | TGT | V247R | CGT | M313V | GTT | F380E | GAG |
| T049K | AAG | W115G | GGT | W181D | GAT | V247S | TCT | M313Y | TAT | F380G | GGG |
| T049L | TTG | W115H | CAT | W181E | GAG | V247T | ACT | K314A | GCT | F380I | ATT |
| T049N | AAT | W115I | ATT | W181F | TTT | V247W | TGG | K314C | TGT | F380L | CTT |
| T049P | CCG | W115K | AAG | W181H | CAT | V247Y | TAT | K314D | GAT | F380P | CCT |
| T049R | AGG | W115L | CTT | W181I | ATT | R248A | GCT | K314H | CAT | F380Q | CAG |
| T049S | TCG | W115M | ATG | W181K | AAG | R248C | TGT | K314I | ATT | F380R | CGG |
| T049V | GTT | W115P | CCT | W181L | CTG | R248D | GAT | K314L | TTG | F380S | AGT |
| T049W | TGG | W115R | CGG | W181M | ATG | R248E | GAG | K314N | AAT | F380T | ACT |
| G050A | GCG | W115S | AGT | W181N | AAT | R248G | GGG | K314P | CCT | F380V | GTG |
| G050C | TGT | W115V | GTG | W181Q | CAG | R248H | CAT | K314Q | CAG | F380W | TGG |
| G050D | GAT | W115Y | TAT | W181R | CGT | R248I | ATT | K314R | CGG | F380Y | TAT |
| G050E | GAG | R116A | GCT | W181S | TCT | R248L | CTT | K314S | TCG | T381A | AGC |
| G050F | TTT | R116C | TGT | W181V | GTG | R248M | ATG | K314T | ACT | T381E | GAG |
| G050H | CAT | R116D | GAT | G182A | GCT | R248P | CCG | K314V | GTT | T381F | TTT |
| G050L | CTT | R116E | GAG | G182C | TGT | R248S | TCG | K314W | TGG | T381G | GGT |
| G050M | ATG | R116G | GGG | G182D | GAT | R248T | ACG | K314Y | TAT | T381H | CAT |
| G050P | CCT | R116H | CAT | G182E | GAG | R248V | GTG | S315A | GCT | T381K | AAG |
| G050Q | CAG | R116I | ATT | G182H | CAT | R248W | TGG | S315C | TGT | T381L | TTG |
| G050R | CGG | R116L | CTG | G182L | CTT | R248Y | TAT | S315E | GAG | T381N | AAT |
| G050S | AGT | R116N | AAT | G182M | ATG | E249A | GCT | S315G | GGT | T381P | CCT |
| G050V | GTT | R116P | CCT | G182N | AAT | E249G | GGG | S315H | CAT | T381Q | CAG |
| G050W | TGG | R116Q | CAG | G182P | CCT | E249H | CAT | S315I | ATT | T381R | CGT |
| G050Y | TAT | R116S | TCT | G182Q | CAG | E249I | ATT | S315K | AAG | T381S | AGT |
| Q051A | GCG | R116T | ACT | G182R | CGT | E249K | AAG | S315L | CTG | T381V | GTG |
| Q051C | TGT | R116V | GTG | G182S | AGT | E249L | CTG | S315M | ATG | T381W | TGG |
| Q051D | GAT | R116W | TGG | G182T | ACT | E249M | ATG | S315P | CCT | T381Y | TAT |
| Q051F | TTT | P117D | GAT | G182V | GTT | E249P | CCT | S315R | CGG | V382E | GAG |
| Q051H | CAT | P117E | GAG | G182Y | TAT | E249Q | CAG | S315T | ACT | V382G | GGG |
| Q051I | ATT | P117F | TTT | Y183A | GCT | E249R | CGG | S315V | GTT | V382H | CAT |
| Q051K | AAG | P117G | GGT | Y183C | TGT | E249S | TCT | S315W | TGG | V382I | ATT |
| Q051M | ATG | P117H | CAT | Y183D | GAT | E249T | ACT | S315Y | TAT | V382K | AAG |
| Q051N | AAT | P117I | ATT | Y183E | GAG | E249V | GTG | C316A | GCT | V382L | TTG |
| Q051P | CCT | P117K | AAG | Y183G | GGG | E249W | TGG | C316D | GAT | V382M | ATG |
| Q051R | CGG | P117N | AAT | Y183I | ATT | E249Y | TAT | C316E | GAG | V382N | AAT |
| Q051S | TCT | P117Q | CAG | Y183K | AAG | A250C | TGT | C316G | GGG | V382P | CCT |
| Q051T | ACG | P117R | AGG | Y183L | TTG | A250F | TTT | C316I | ATT | V382Q | CAG |
| Q051W | TGG | P117S | TCG | Y183N | AAT | A250G | GGT | C316K | AAG | V382R | CGG |
| Q051Y | TAT | P117T | ACT | Y183P | CCT | A250H | CAT | C316L | CTG | V382S | TCG |
| G052A | GCT | P117V | GTT | Y183Q | CAG | A250K | AAG | C316M | ATG | V382T | ACT |
| G052C | TGT | P117W | TGG | Y183R | CGT | A250L | CTG | C316P | CCT | V382W | TGG |
| G052E | GAG | P117Y | TAT | Y183S | TCT | A250M | ATG | C316R | AGG | V382Y | TAT |
| G052F | TTT | T118C | TGT | Y183V | GTT | A250N | AAT | C316S | TCT | R383A | GCT |
| G052H | CAT | T118D | GAT | Y183W | TGG | A250P | CCT | C316T | ACT | R383E | GAG |
| G052K | AAG | T118E | GAG | Y184A | GCT | A250Q | CAG | C316V | GTT | R383F | TTT |
| G052L | CTT | T118G | GGG | Y184C | TGT | A250R | AGG | C316W | TGG | R383G | GGG |
| G052N | AAT | T118H | CAT | Y184D | GAT | A250S | TCT | C316Y | TAT | R383H | CAT |
| G052P | CCT | T118K | AAG | Y184E | GAG | A250T | ACG | L317A | GCT | R383I | ATT |
| G052Q | CAG | T118L | CTG | Y184F | TTT | A250V | GTG | L317C | TGT | R383K | AAG |
| G052R | CGG | T118M | ATG | Y184G | GGT | A250W | TGG | L317D | GAT | R383L | CTG |
| G052S | AGT | T118N | AAT | Y184H | CAT | I251C | TGT | L317G | GGG | R383M | ATG |
| G052T | ACT | T118P | CCT | Y184K | AAG | I251D | GAT | L317H | CAT | R383N | AAT |
| G052W | TGG | T118Q | CAG | Y184L | CTT | I251F | TTT | L317I | ATT | R383P | CCT |
| G052Y | TAT | T118R | CGT | Y184M | ATG | I251G | GGG | L317K | AAG | R383S | TCG |
| V053A | GCG | T118V | GTT | Y184P | CCT | I251H | CAT | L317M | ATG | R383T | ACT |
| V053C | TGT | T118W | TGG | Y184R | AGG | I251K | AAG | L317N | AAT | R383V | GTG |
| V053D | GAT | T118Y | TAT | Y184S | TCG | I251L | CTT | L317P | CCT | R383W | TGG |
| V053E | GAG | W119A | GCT | Y184V | GTG | I251M | ATG | L317Q | CAG | G384A | GCT |
| V053G | GGG | W119D | GAT | Y184W | TGG | I251P | CCG | L317R | AGG | G384C | TGT |
| V053H | CAT | W119E | GAG | L185A | GCT | I251Q | CAG | L317S | TCG | G384D | GAT |
| V053L | CTG | W119F | TTT | L185D | GAT | I251S | AGT | L317T | ACT | G384E | GAG |
| V053N | AAT | W119G | GGT | L185E | GAG | I251T | ACT | L317W | TGG | G384F | TTT |
| V053P | CCG | W119I | ATT | L185F | TTT | I251V | GTG | L318C | TGT | G384H | CAT |
| V053Q | CAG | W119K | AAG | L185G | GGG | I251W | TGG | L318D | GAT | G384I | ATT |
| V053R | CGG | W119L | CTG | L185I | ATT | I251Y | TAT | L318F | TTT | G384K | AAG |
| V053S | AGT | W119N | AAT | L185K | AAG | R252A | GCT | L318G | GGG | G384L | CTT |
| V053T | ACT | W119P | CCT | L185N | AAT | R252D | GAT | L318H | CAT | G384M | ATG |
| V053W | TGG | W119Q | CAG | L185P | CCT | R252E | GAG | L318I | ATT | G384P | CCT |
| V053Y | TAT | W119R | CGG | L185R | CGG | R252F | TTT | L318K | AAG | G384Q | CAG |
| T054A | GCG | W119S | TCT | L185S | TCG | R252G | GGT | L318M | ATG | G384R | AGG |
| T054D | GAT | W119V | GTT | L185T | ACT | R252H | CAT | L318N | AAT | G384S | TCG |
| T054E | GAG | W119Y | TAT | L185V | GTG | R252I | ATT | L318P | CCT | G384T | ACT |
| T054F | TTT | A120C | TGT | L185W | TGG | R252K | AAG | L318Q | CAG | K385A | GCT |
| T054G | GGG | A120D | GAT | L185Y | TAT | R252L | CTG | L318R | CGG | K385C | TGT |
| T054H | CAT | A120F | TTT | F186A | GCT | R252N | AAT | L318S | AGT | K385G | GGG |
| T054I | ATT | A120G | GGG | F186D | GAT | R252P | CCT | L318T | ACT | K385H | CAT |
| T054M | ATG | A120H | CAT | F186G | GGT | R252S | TCG | L318W | TGG | K385L | CTT |
| T054N | AAT | A120I | ATT | F186H | CAT | R252T | ACT | L319C | TGT | K385M | ATG |
| T054P | CCG | A120L | CTT | F186I | ATT | R252V | GTG | L319E | GAG | K385N | AAT |
| T054Q | CAG | A120N | AAT | F186K | AAG | R252Y | TAT | L319F | TTT | K385P | CCG |
| T054R | CGT | A120P | CCT | F186L | CTT | V253A | GCG | L319G | GGG | K385Q | CAG |
| T054S | AGT | A120R | CGT | F186N | AAT | V253D | GAT | L319H | CAT | K385R | CGT |
| T054V | GTT | A120S | TCT | F186P | CCT | V253E | GAG | L319I | ATT | K385S | TCT |
| T054Y | TAT | A120T | ACT | F186Q | CAG | V253G | GGG | L319K | AAG | K385T | ACG |
| I055A | GCT | A120V | GTG | F186R | AGG | V253H | CAT | L319M | ATG | K385V | GTT |
| I055C | TGT | A120W | TGG | F186S | TCT | V253I | ATT | L319P | CCT | K385W | TGG |
| I055D | GAT | A120Y | TAT | F186V | GTT | V253L | CTG | L319Q | CAG | K385Y | TAT |
| I055F | TTT | R121A | GCT | F186W | TGG | V253M | ATG | L319R | AGG | P386A | GCG |
| I055G | GGG | R121C | TGT | F186Y | TAT | V253N | AAT | L319S | TCG | P386C | TGT |
| I055H | CAT | R121D | GAT | P187A | GCT | V253P | CCT | L319V | GTT | P386F | TTT |
| I055L | CTG | R121E | GAG | P187F | TTT | V253Q | CAG | L319W | TGG | P386G | GGG |
| I055N | AAT | R121F | TTT | P187G | GGG | V253R | CGG | L319Y | TAT | P386H | CAT |
| I055P | CCT | R121G | GGT | P187H | CAT | V253S | TCG | D320C | TGT | P386I | ATT |
| I055Q | CAG | R121H | CAT | P187I | ATT | V253T | ACG | D320E | GAG | P386L | CTT |
| I055R | CGT | R121K | AAG | P187L | CTT | V253W | TGG | D320F | TTT | P386M | ATG |
| I055S | TCG | R121L | CTG | P187M | ATG | S254C | TGT | D320G | GGG | P386N | AAT |
| I055T | ACT | R121M | ATG | P187N | AAT | S254D | GAT | D320H | CAT | P386Q | CAG |
| I055V | GTT | R121P | CCT | P187Q | CAG | S254E | GAG | D320I | ATT | P386R | CGT |
| I055Y | TAT | R121S | TCG | P187R | AGG | S254G | GGG | D320K | AAG | P386S | AGT |
| F056A | GCG | R121T | ACT | P187S | TCG | S254I | ATT | D320L | TTG | P386T | ACG |
| F056C | TGT | R121V | GTT | P187T | ACT | S254K | AAG | D320M | ATG | P386V | GTT |
| F056E | GAG | R121W | TGG | P187V | GTT | S254L | TTG | D320N | AAT | P386Y | TAT |
| F056G | GGG | R121Y | TAT | P187W | TGG | S254N | AAT | D320P | CCT | T387C | TGT |
| F056H | CAT | N122A | GCT | P187Y | TAT | S254P | CCT | D320R | AGG | T387E | GAG |
| F056I | ATT | N122C | TGT | D188A | GCT | S254Q | CAG | D320S | AGT | T387F | TTT |
| F056K | AAG | N122E | GAG | D188C | TGT | S254R | CGG | D320V | GTG | T387G | GGG |
| F056L | TTG | N122F | TTT | D188F | TTT | S254T | ACT | D320W | TGG | T387H | CAT |
| F056N | AAT | N122I | ATT | D188G | GGG | S254V | GTG | D320Y | TAT | T387I | ATT |
| F056P | CCG | N122K | AAG | D188H | CAT | S254W | TGG | N321A | GCT | T387K | AAG |
| F056R | CGT | N122L | CTG | D188L | CTT | S254Y | TAT | N321D | GAT | T387L | CTG |
| F056S | TCT | N122M | ATG | D188M | ATG | K255A | GCG | N321E | GAG | T387M | ATG |
| F056T | ACT | N122P | CCT | D188N | AAT | K255C | TGT | N321G | GGT | T387N | AAT |
| F056V | GTT | N122Q | CAG | D188P | CCT | K255D | GAT | N321H | CAT | T387Q | CAG |
| F056W | TGG | N122R | CGG | D188Q | CAG | K255G | GGT | N321I | ATT | T387S | TCG |
| Y057A | GCT | N122S | TCT | D188R | AGG | K255H | CAT | N321K | AAG | T387V | GTT |
| Y057D | GAT | N122T | ACT | D188S | AGT | K255L | TTG | N321L | CTG | T387W | TGG |
| Y057E | GAG | N122V | GTT | D188T | ACT | K255N | AAT | N321M | ATG | T387Y | TAT |
| Y057F | TTT | N122W | TGG | D188V | GTG | K255P | CCG | N321P | CCT | L388A | GCG |
| Y057G | GGG | W123A | GCT | D188W | TGG | K255Q | CAG | N321R | CGG | L388C | TGT |
| Y057I | ATT | W123C | TGT | C189A | GCT | K255R | CGG | N321S | TCT | L388F | TTT |
| Y057L | TTG | W123D | GAT | C189E | GAG | K255S | TCG | N321T | ACT | L388G | GGG |
| Y057M | ATG | W123E | GAG | C189G | GGT | K255T | ACT | N321V | GTG | L388H | CAT |
| Y057P | CCG | W123G | GGG | C189H | CAT | K255V | GTT | N321Y | TAT | L388I | ATT |
| Y057Q | CAG | W123H | CAT | C189K | AAG | K255W | TGG | Y322C | TGT | L388M | ATG |
| Y057R | CGG | W123L | CTT | C189L | TTG | K255Y | TAT | Y322D | GAT | L388P | CCT |
| Y057S | AGT | W123M | ATG | C189M | ATG | I256A | GCT | Y322E | GAG | L388Q | CAG |
| Y057T | ACG | W123P | CCT | C189N | ACT | I256C | TGT | Y322F | TTT | L388R | CGT |
| Y057V | GTG | W123Q | CAG | C189P | CCT | I256D | GAT | Y322G | GGT | L388S | TCG |
| Y057W | TGG | W123R | AGG | C189R | AGG | I256E | GAG | Y322H | CAT | L388T | ACG |
| V058A | GCT | W123S | AGT | C189S | TCG | I256G | GGG | Y322I | ATT | L388V | GTT |
| V058C | TGT | W123T | ACT | C189T | ACT | I256H | CAT | Y322L | CTG | L388W | TGG |
| V058D | GAT | W123V | GTT | C189V | GTG | I256L | CTT | Y322N | AAT | L388Y | TAT |
| V058G | GGT | W123Y | TAT | C189W | TGG | I256M | ATG | Y322P | CCT | E389A | GCT |
| V058H | CAT | K124A | GCT | C189Y | TAT | I256N | AAT | Y322R | CGT | E389F | TTT |
| V058I | ATT | K124C | TGT | Y190C | TGT | I256P | CCG | Y322S | TCT | E389G | GGT |
| V058K | AAG | K124D | GAT | Y190E | GAG | I256Q | CAG | Y322T | ACT | E389H | CAT |
| V058L | CTT | K124E | GAG | Y190F | TTT | I256R | AGG | Y322V | GTG | E389I | ATT |
| V058N | AAT | K124F | TTT | Y190G | GGG | I256T | ACG | Y322W | TGG | E389K | AAG |
| V058P | CCT | K124G | GGG | Y190H | CAT | I256V | GTT | M323A | GCT | E389L | CTG |
| V058Q | CAG | K124H | CAT | Y190K | AAG | I256W | TGG | M323C | TGT | E389M | ATG |
| V058R | CGG | K124I | ATT | Y190L | CTT | P257A | GCG | M323E | GAG | E389P | CCT |
| V058S | TCG | K124L | CTT | Y190N | AAT | P257C | TGT | M323F | TTT | E389Q | CAG |
| V058W | TGG | K124N | AAT | Y190P | CCT | P257D | GAT | M323G | GGG | E389R | CGG |
| V058Y | TAT | K124P | CCT | Y190Q | CAG | P257G | GGG | M323H | CAT | E389S | TCG |
| D059A | GCT | K124R | CGG | Y190R | CGT | P257I | ATT | M323I | ATT | E389T | ACT |
| D059E | GAG | K124S | TCT | Y190S | TCT | P257K | AAG | M323K | AAG | E389V | GTT |
| D059G | GGG | K124T | ACT | Y190T | ACT | P257L | CTT | M323L | TTG | E389Y | TAT |
| D059H | CAT | K124V | GTG | Y190V | GTG | P257M | ATG | M323N | AAT | D390A | GCG |
| D059I | ATT | K124W | TGG | Y190W | TGG | P257N | AAT | M323P | CCT | D390C | TGT |
| D059L | CTT | P125A | GCT | N191A | GCT | P257Q | CAG | M323R | CGG | D390E | GAG |
| D059M | ATG | P125C | TGT | N191E | GAG | P257R | CGT | M323S | AGT | D390F | TTT |
| D059N | AAT | P125D | GAT | N191F | TTT | P257S | TCG | M323T | ACT | D390G | GGG |
| D059P | CCT | P125G | GGG | N191G | GGG | P257T | ACG | M323V | GTT | D390H | CAT |
| D059Q | CAG | P125H | CAT | N191K | AAG | P257V | GTG | E324A | GCT | D390L | CTT |
| D059R | CGT | P125I | ATT | N191L | TTG | P257W | TGG | E324C | TGT | D390N | AAT |
| D059T | ACG | P125L | CTT | N191M | ATG | D258A | GCG | E324D | GAT | D390P | CCG |
| D059V | GTG | P125N | AAT | N191P | CCT | D258E | GAG | E324F | TTT | D390R | CGG |
| D059W | TGG | P125Q | CAG | N191Q | CAG | D258G | GGG | E324G | GGG | D390S | AGT |
| D059Y | TAT | P125R | CGT | N191R | CGG | D258H | CAT | E324H | CAT | D390T | ACT |
| R060A | GCG | P125S | TCG | N191S | TCG | D258I | ATT | E324L | TTG | D390V | GTG |
| R060D | GAT | P125T | ACT | N191T | ACT | D258L | CTT | E324M | ATG | D390W | TGG |
| R060F | TTT | P125V | GTG | N191V | GTT | D258N | AAT | E324N | AAT | D390Y | TAT |
| R060G | GGT | P125W | TGG | N191W | TGG | D258P | CCG | E324P | CCT | L391A | GCT |
| R060H | CAT | P125Y | TAT | N191Y | TAT | D258Q | CAG | E324R | CGG | L391C | TGT |
| R060I | ATT | K126A | GCT | H192C | TGT | D258R | CGT | E324S | AGT | L391D | GAT |
| R060K | AAG | K126D | GAT | H192F | TTT | D258S | AGT | E324V | GTG | L391G | GGG |
| R060L | CTT | K126E | GAG | H192G | GGT | D258T | ACG | E324W | TGG | L391H | CAT |
| R060N | AAT | K126F | TTT | H192K | AAG | D258V | GTG | E324Y | TAT | L391K | AAG |
| R060P | CCG | K126G | GGT | H192L | CTT | D258W | TGG | T325A | GCT | L391N | AAT |
| R060Q | CAG | K126H | CAT | H192M | ATG | D258Y | TAT | T325C | TGT | L391P | CCT |
| R060S | TCG | K126I | ATT | H192N | AAT | A259E | GAG | T325D | GAT | L391Q | CAG |
| R060T | ACG | K126L | CTG | H192P | CCT | A259G | GGG | T325E | GAG | L391R | CGG |
| R060V | GTT | K126M | ATG | H192Q | CAG | A259I | ATT | T325G | GGT | L391S | TCT |
| R060Y | TAT | K126N | AAT | H192R | CGT | A259K | AAG | T325H | CAT | L391T | ACT |
| L061A | GCT | K126P | CCT | H192S | TCG | A259L | TTG | T325I | ATT | L391V | GTG |
| L061E | GAG | K126Q | CAG | H192T | ACT | A259M | ATG | T325K | AAG | L391W | TGG |
| L061F | TTT | K126R | AGG | H192V | GTT | A259N | AAT | T325M | ATG | L391Y | TAT |
| L061G | GGG | K126S | TCT | H192W | TGG | A259P | CCT | T325N | AAT | E392A | GCT |
| L061H | CAT | K126T | ACT | H192Y | TAT | A259Q | CAG | T325Q | CAG | E392C | TGT |
| L061I | ATT | K126V | GTG | H193A | GCT | A259R | CGT | T325R | CGG | E392F | TTT |
| L061M | ATG | K126W | TGG | H193C | TGT | A259S | AGT | T325S | TCG | E392G | GGG |
| L061N | AAT | K126Y | TAT | H193D | GAT | A259T | ACT | T325V | GTG | E392K | AAG |
| L061P | CCT | D127A | GCT | H193F | TTT | A259V | GTG | T325W | TGG | E392L | CTG |
| L061Q | CAG | D127E | GAG | H193G | GGG | A259W | TGG | I326A | GCT | E392M | ATG |
| L061R | AGG | D127F | TTT | H193K | AAG | A259Y | TAT | I326C | TGT | E392P | CCT |
| L061T | ACT | D127G | GGT | H193L | TTG | K260A | GCG | I326D | GAT | E392Q | CAG |
| L061V | GTT | D127H | CAT | H193M | ATG | K260C | TGT | I326E | GAG | E392R | AGG |
| L061W | TGG | D127K | AAG | H193P | CCG | K260D | GAT | I326G | GGG | E392S | AGT |
| L061Y | TAT | D127L | CTG | H193Q | CAG | K260E | GAG | I326H | CAT | E392T | ACT |
| G062A | GCG | D127M | ATG | H193R | AGG | K260G | GGG | I326K | AAG | E392V | GTT |
| G062C | TGT | D127N | AAT | H193S | TCT | K260H | CAT | I326L | CTT | E392W | TGG |
| G062D | GAT | D127Q | CAG | H193T | ACG | K260L | TTG | I326N | AAT | E392Y | TAT |
| G062F | TTT | D127R | CGT | H193V | GTG | K260M | ATG | I326P | CCT | Q393A | GCG |
| G062I | ATT | D127S | AGT | H193Y | TAT | K260P | CCG | I326R | CGG | Q393C | TGT |
| G062K | AAG | D127T | ACT | Y194A | GCT | K260Q | CAG | I326S | TCT | Q393D | GAT |
| G062L | CTT | D127V | GTT | Y194C | TGT | K260R | CGG | I326V | GTG | Q393F | TTT |
| G062M | ATG | D127W | TGG | Y194E | GAG | K260S | TCT | I326W | TGG | Q393G | GGT |
| G062P | CCT | V128A | GCT | Y194F | TTT | K260V | GTT | I326Y | TAT | Q393H | CAT |
| G062Q | CAG | V128C | TGT | Y194G | GGG | K260W | TGG | L327A | GCT | Q393I | ATT |
| G062R | CGT | V128E | GAG | Y194I | ATT | K260Y | TAT | L327D | GAT | Q393K | AAG |
| G062S | AGT | V128F | TTT | Y194L | TTG | S261A | GCG | L327E | GAG | Q393L | TTG |
| G062T | ACT | V128G | GGG | Y194N | AAT | S261E | GAG | L327F | TTT | Q393M | ATG |
| G062V | GTG | V128H | CAT | Y194P | CCT | S261F | TTT | L327G | GGG | Q393N | AAT |
| G062Y | TAT | V128I | ATT | Y194Q | CAG | S261G | GGG | L327H | CAT | Q393P | CCG |
| Y063A | GCG | V128K | AAG | Y194R | AGG | S261I | ATT | L327M | ATG | Q393R | CGT |
| Y063C | TGT | V128L | CTG | Y194S | TCG | S261K | AAG | L327N | AAT | Q393S | TCG |
| Y063G | GGT | V128P | CCT | Y194T | ACG | S261L | CTT | L327Q | CAG | Q393T | ACG |
| Y063H | CAT | V128Q | CAG | Y194V | GTG | S261M | ATG | L327R | CGG | F394A | GCG |
| Y063I | ATT | V128R | AGG | Y194W | TGG | S261N | AAT | L327S | AGT | F394D | GAT |
| Y063K | AAG | V128S | TCG | K195A | GCG | S261P | CCT | L327T | ACT | F394E | GAG |
| Y063L | CTG | V128W | TGG | K195E | GAG | S261Q | CAG | L327V | GTG | F394G | GGG |
| Y063M | ATG | V128Y | TAT | K195F | TTT | S261R | CGT | L327W | TGG | F394I | ATT |
| Y063N | AAT | Y129A | GCT | K195G | GGT | S261T | ACT | L327Y | TAT | F394K | AAG |
| Y063P | CCT | Y129C | TGT | K195H | CAT | S261V | GTT | N328A | GCT | F394L | CTG |
| Y063R | AGG | Y129D | GAT | K195I | ATT | S261W | TGG | N328C | TGT | F394N | AAT |
| Y063S | TCT | Y129E | GAG | K195L | TTG | P262A | GCG | N328D | GAT | F394P | CCG |
| Y063T | ACG | Y129G | GGG | K195N | AAT | P262D | GAT | N328G | GGT | F394Q | CAG |
| Y063V | GTG | Y129H | CAT | K195Q | CAG | P262E | GAG | N328H | CAT | F394R | CGT |
| Y063W | TGG | Y129L | TTG | K195R | CGT | P262F | TTT | N328I | ATT | F394S | TCG |
| Y064A | GCT | Y129M | ATG | K195S | TCT | P262G | GGG | N328K | AAG | F394T | ACT |
| Y064C | TGT | Y129P | CCT | K195T | ACT | P262H | CAT | N328L | CTT | F394V | GTT |
| Y064D | GAT | Y129Q | CAG | K195V | GTG | P262I | ATT | N328Q | CAG | F394W | TGG |
| Y064E | GAG | Y129R | CGG | K195W | TGG | P262K | AAG | N328R | AGG | S395A | GCG |
| Y064F | TTT | Y129S | AGT | K195Y | TAT | P262Q | CAG | N328S | AGT | S395C | TGT |
| Y064G | GGT | Y129T | ACT | K196A | GCT | P262R | CGT | N328T | ACT | S395D | GAT |
| Y064H | CAT | Y129V | GTT | K196C | TGT | P262S | TCT | N328V | GTG | S395E | GAG |
| Y064I | ATT | Y129W | TGG | K196D | GAT | P262T | ACT | N328W | TGG | S395G | GGG |
| Y064K | AAG | K130C | TGT | K196E | GAG | P262V | GTG | N328Y | TAT | S395H | CAT |
| Y064L | CTT | K130D | GAT | K196G | GGG | P262W | TGG | P329C | TGT | S395K | AAG |
| Y064P | CCT | K130E | GAG | K196I | ATT | P262Y | TAT | P329F | TTT | S395L | CTT |
| Y064Q | CAG | K130G | GGG | K196L | TTG | L263A | GCT | P329G | GGT | S395M | ATG |
| Y064R | CGG | K130H | CAT | K196N | AAT | L263E | GAG | P329H | CAT | S395P | CCT |
| Y064S | AGT | K130I | ATT | K196P | CCG | L263F | TTT | P329I | ATT | S395R | CGG |
| Y064T | ACT | K130L | TTG | K196R | CGT | L263G | GGG | P329K | AAG | S395T | ACG |
| Y064V | GTT | K130N | AAT | K196S | TCG | L263H | CAT | P329L | CTG | S395V | GTT |
| Y064W | TGG | K130Q | CAG | K196T | ACT | L263K | AAG | P329N | AAT | S395W | TGG |
| P065A | GCT | K130R | AGG | K196V | GTG | L263M | ATG | P329Q | CAG | S395Y | TAT |
| P065C | TGT | K130S | TCT | K196W | TGG | L263N | AAT | P329R | CGT | E396A | GCG |
| P065D | GAT | K130T | ACT | K196Y | TAT | L263P | CCG | P329S | AGT | E396C | TGT |
| P065F | TTT | K130V | GTG | P197A | GCT | L263Q | CAG | P329T | ACT | E396D | GAT |
| P065G | GGG | K130W | TGG | P197C | TGT | L263R | CGG | P329V | GTT | E396F | TTT |
| P065H | CAT | K130Y | TAT | P197D | GAT | L263S | AGT | P329W | TGG | E396G | GGG |
| P065I | ATT | N131C | TGT | P197E | GAG | L263T | ACT | P329Y | TAT | E396H | CAT |
| P065K | AAG | N131E | GAG | P197F | TTT | L263V | GTT | Y330A | GCT | E396I | ATT |
| P065N | AAT | N131F | TTT | P197G | GGT | L263W | TGG | Y330C | TGT | E396L | CTT |
| P065R | CGG | N131G | GGG | P197H | CAT | P264A | GCG | Y330D | GAT | E396P | CCG |
| P065S | TCG | N131H | CAT | P197K | AAG | P264D | GAT | Y330E | GAG | E396Q | CAG |
| P065T | ACG | N131I | ATT | P197L | TTG | P264E | GAG | Y330F | TTT | E396R | AGG |
| P065V | GTT | N131L | CTT | P197M | ATG | P264F | TTT | Y330G | GGT | E396S | TCT |
| P065W | TGG | N131M | ATG | P197Q | CAG | P264G | GGT | Y330I | ATT | E396T | ACT |
| P065Y | TAT | N131P | CCT | P197R | CGT | P264H | CAT | Y330L | CTG | E396V | GTG |
| Y066A | GCG | N131Q | CAG | P197S | AGT | P264L | CTT | Y330M | ATG | E396Y | TAT |
| Y066C | TGT | N131R | CGG | P197T | ACT | P264M | ATG | Y330N | AAT | K397A | GCT |
| Y066D | GAT | N131S | AGT | P197W | TGG | P264N | AAT | Y330P | CCT | K397C | TGT |
| Y066E | GAG | N131T | ACT | G198A | GCT | P264R | CGG | Y330R | AGG | K397E | GAG |
| Y066G | GGT | N131V | GTG | G198C | TGT | P264S | AGT | Y330S | AGT | K397F | TTT |
| Y066H | CAT | N131Y | TAT | G198D | GAT | P264T | ACT | Y330V | GTT | K397G | GGT |
| Y066I | ATT | R132A | GCT | G198E | GAG | P264V | GTT | I331V | GTG | K397I | ATT |
| Y066K | AAG | R132C | TGT | G198H | CAT | P264W | TGG | Y330W | TGG | K397L | TTG |
| Y066L | CTG | R132E | GAG | G198L | CTG | P264Y | TAT | I331A | GCT | K397M | ATG |
| Y066N | AAT | R132F | TTT | G198N | AAT | V265A | GCG | I331C | TGT | K397N | AAT |
| Y066P | CCT | R132H | CAT | G198P | CCG | V265C | TGT | I331D | GAT | K397P | CCG |
| Y066R | CGG | R132I | ATT | G198Q | CAG | V265D | GAT | I331E | GAG | K397Q | CAG |
| K397T | ACT | R132K | AAG | G198R | AGG | V265E | GAG | I331F | TTT | K397R | AGG |
| K397V | GTT | R132L | TTG | G198S | TCT | V265F | TTT | I331H | CAT | K397S | TCG |
| F398A | GCT | L406P | CCT | K415G | GGT | C423T | ACT | A432L | TTG | E441D | GAT |
| F398C | TGT | L406Q | CAG | K415L | CTG | C423V | GTG | A432M | ATG | E441F | TTT |
| F398E | GAG | L406R | CGG | K415M | ATG | C423W | TGG | A432N | AAT | E441G | GGG |
| F398G | GGT | L406S | AGT | K415P | CCG | I424A | GCT | A432P | CCT | E441H | CAT |
| F398H | CAT | L406T | ACG | K415Q | CAG | I424C | TGT | A432R | AGG | E441K | AAG |
| F398I | ATT | L406V | GTT | K415R | CGG | I424E | GAG | A432S | TCT | E441L | CTT |
| F398L | CTT | L406Y | TAT | K415S | TCT | I424G | GGG | A432V | GTG | E441N | AAT |
| F398N | AAT | S407A | GCG | K415T | ACT | I424H | CAT | A432Y | TAT | E441Q | CAG |
| F398P | CCT | S407D | GAT | K415V | GTG | I424K | AAG | F433A | GCT | E441R | CGG |
| F398R | AGG | S407E | GAG | K415W | TGG | I424L | CTT | F433C | TGT | E441S | AGT |
| F398S | TCT | S407F | TTT | K415Y | TAT | I424N | AAT | F433D | GAT | E441T | ACT |
| F398T | ACT | S407G | GGT | D416C | TGT | I424Q | CAG | F433E | GAG | E441V | GTG |
| F398V | GTT | S407H | CAT | D416F | TTT | I424R | CGG | F433G | GGG | E441Y | TAT |
| F398W | TGG | S407L | CTG | D416G | GGT | I424S | TCG | F433H | CAT | E442C | TGT |
| F398Y | TAT | S407M | ATG | D416H | CAT | I424T | ACT | F433I | ATT | E442G | GGG |
| Y399A | GCG | S407N | AAT | D416I | ATT | I424V | GTT | F433K | AAG | E442H | CAT |
| Y399C | TGT | S407P | CCT | D416K | AAG | I424W | TGG | F433L | TTG | E442K | AAG |
| Y399D | GAT | S407Q | CAG | D416L | CTT | I424Y | TAT | F433P | CCT | E442L | CTT |
| Y399E | GAG | S407R | CGG | D416N | AAT | A425C | TGT | F433R | CGG | E442M | ATG |
| Y399G | GGG | S407T | ACG | D416Q | CAG | A425D | GAT | F433S | AGT | E442N | AAT |
| Y399K | AAG | S407V | GTG | D416R | CGG | A425E | GAG | F433T | ACT | E442P | CCT |
| Y399M | ATG | S407W | TGG | D416S | TCT | A425G | GGT | F433V | GTG | E442Q | CAG |
| Y399N | AAT | C408A | GCG | D416T | ACG | A425I | ATT | F433W | TGG | E442R | CGG |
| Y399P | CCT | C408E | GAG | D416V | GTG | A425K | AAG | L434F | TTT | E442S | AGT |
| Y399Q | CAG | C408F | TTT | D416W | TGG | A425L | TTG | L434G | GGT | E442T | ACT |
| Y399R | CGG | C408G | GGG | D416Y | TAT | A425M | ATG | L434H | CAT | E442V | GTG |
| Y399S | TCG | C408I | ATT | T417A | GCT | A425N | AAT | L434I | ATT | E442W | TGG |
| Y399T | ACG | C408K | AAG | T417D | GAT | A425P | CCT | L434K | AAG | E442Y | TAT |
| Y399V | GTT | C408L | CTT | T417E | GAG | A425R | AGG | L434M | ATG | P443A | GCT |
| Y399W | TGG | C408N | AAT | T417F | TTT | A425S | AGT | L434N | AAT | P443D | GAT |
| C400A | GCG | C408P | CCT | T417G | GGG | A425V | GTG | L434P | CCT | P443E | GAG |
| C400D | GAT | C408R | CGT | T417H | CAT | A425W | TGG | L434Q | CAG | P443F | TTT |
| C400E | GAG | C408S | TCG | T417I | ATT | A425Y | TAT | L434R | CGG | P443G | GGG |
| C400F | TTT | C408T | ACT | T417K | AAG | D426A | GCT | L434S | AGT | P443H | CAT |
| C400G | GGG | C408V | GTT | T417L | TTG | D426C | TGT | L434T | ACT | P443I | ATT |
| C400I | ATT | C408W | TGG | T417M | ATG | D426E | GAG | L434V | GTT | P443L | CTT |
| C400L | CTG | C408Y | TAT | T417P | CCT | D426F | TTT | L434W | TGG | P443M | ATG |
| C400M | ATG | K409A | GCG | T417Q | CAG | D426G | GGG | L434Y | TAT | P443N | AAT |
| C400P | CCG | K409C | TGT | T417R | CGT | D426I | ATT | K435A | GCT | P443Q | CAG |
| C400Q | CAG | K409D | GAT | T417S | TCG | D426K | AAG | K435C | TGT | P443R | AGG |
| C400R | CGG | K409E | GAG | T417W | TGG | D426L | CTG | K435E | GAG | P443S | TCT |
| C400S | AGT | K409G | GGT | D418A | GCT | D426M | ATG | K435F | TTT | P443T | ACT |
| C400T | ACG | K409H | CAT | D418C | TGT | D426N | AAT | K435G | GGT | P443W | TGG |
| C400V | GTG | K409I | ATT | D418E | GAG | D426P | CCT | K435H | CAT | Q444C | TGT |
| C400Y | TAT | K409L | CTG | D418F | TTT | D426Q | CAG | K435I | ATT | Q444D | GAT |
| S401A | GCT | K409P | CCG | D418G | GGT | D426R | CGT | K435L | CTG | Q444E | GAG |
| S401C | TGT | K409Q | CAG | D418I | ATT | D426S | TCG | K435P | CCT | Q444F | TTT |
| S401D | GAT | K409R | AGG | D418L | TTG | D426Y | TAT | K435R | AGG | Q444G | GGG |
| S401E | GAG | K409S | TCG | D418M | ATG | G427A | GCT | K435S | TCT | Q444H | CAT |
| S401F | TTT | K409T | ACG | D418N | AAT | G427C | TGT | K435T | ACT | Q444I | ATT |
| S401G | GGG | K409V | GTG | D418P | CCT | G427F | TTT | K435V | GTT | Q444K | AAG |
| S401H | CAT | K409W | TGG | D418Q | CAG | G427H | CAT | K435W | TGG | Q444L | CTG |
| S401K | AAG | A412Y | TAT | D418R | CGG | G427I | ATT | K435Y | TAT | Q444M | ATG |
| S401L | CTT | E410D | GAT | D418S | TCG | G427K | AAG | P436C | TGT | Q444N | AAT |
| S401N | AAT | E410G | GGG | D418V | GTG | G427L | CTG | P436D | GAT | Q444R | CGG |
| S401Q | CAG | E410I | ATT | D418Y | TAT | G427P | CCT | P436E | GAG | Q444V | GTT |
| S401R | CGT | E410K | AAG | A419D | GAT | G427Q | CAG | P436G | GGG | Q444W | TGG |
| S401T | ACT | E410L | CTT | A419E | GAG | G427R | CGT | P436H | CAT | Q444Y | TAT |
| S401W | TGG | E410M | ATG | A419F | TTT | G427S | AGT | P436I | ATT | I445A | GCT |
| S401Y | TAT | E410N | AAT | A419G | GGG | G427T | ACT | P436K | AAG | I445C | TGT |
| C402A | GCT | E410P | CCG | A419H | CAT | G427V | GTG | P436L | CTG | I445D | GAT |
| C402D | GAT | E410Q | CAG | A419I | ATT | G427W | TGG | P436M | ATG | I445G | GGG |
| C402E | GAG | E410R | CGT | A419K | AAG | G427Y | TAT | P436Q | CAG | I445H | CAT |
| C402F | TTT | E410S | TCG | A419L | CTT | V428A | GCT | P436R | CGG | I445K | AAG |
| C402G | GGG | E410T | ACG | A419N | AAT | V428C | TGT | P436S | TCT | I445L | CTT |
| C402L | TTG | E410V | GTG | A419P | CCT | V428D | GAT | P436T | ACT | I445M | ATG |
| C402M | ATG | E410W | TGG | A419R | CGG | V428E | GAG | P436W | TGG | I445N | AAT |
| C402P | CCT | E410Y | TAT | A419S | TCT | V428F | TTT | P436Y | TAT | I445P | CCT |
| C402Q | CAG | K411A | GCT | A419T | ACT | V428G | GGT | P437A | GCT | I445Q | CAG |
| C402R | CGG | K411D | GAT | A419W | TGG | V428H | CAT | P437D | GAT | I445R | AGG |
| C402S | TCT | K411E | GAG | A419Y | TAT | V428L | CTT | P437F | TTT | I445S | AGT |
| C402T | ACG | K411F | TTT | V420A | GCT | V428M | ATG | P437G | GGT | I445T | ACT |
| C402V | GTT | K411G | GGG | V420D | GAT | V428N | AAT | P437H | CAT | I445V | GTG |
| C402W | TGG | K411H | CAT | V420F | TTT | V428P | CCT | P437I | ATT | I445W | TGG |
| C402Y | TAT | K411I | ATT | V420G | GGT | V428R | CGG | P437K | AAG | I445Y | TAT |
| Y403A | GCT | K411L | CTG | V420H | CAT | V428S | TCG | P437L | CTG | F446A | GCT |
| Y403C | TGT | K411N | AAT | V420I | ATT | V428T | ACT | P437M | ATG | F446C | TGT |
| Y403E | GAG | K411P | CCT | V420K | AAG | V428Y | TAT | P437Q | CAG | F446D | GAT |
| Y403F | TTT | K411R | AGG | V420L | CTT | C429A | GCT | P437R | CGT | F446E | GAG |
| Y403G | GGT | K411S | TCG | V420N | AAT | C429D | GAT | P437S | TCT | F446G | GGG |
| Y403H | CAT | K411T | ACT | V420P | CCT | C429G | GGT | P437T | ACT | F446H | CAT |
| Y403K | AAG | K411V | GTT | V420R | AGG | C429I | ATT | P437W | TGG | F446I | ATT |
| Y403L | TTG | K411W | TGG | V420S | TCT | C429K | AAG | P437Y | TAT | F446K | AAG |
| Y403M | ATG | A412D | GAT | V420T | ACT | C429L | TTG | M438A | GCT | F446L | TTG |
| Y403N | AAT | A412E | GAG | V420W | TGG | C429M | ATG | M438C | TGT | F446M | ATG |
| Y403P | CCG | A412G | GGG | V420Y | TAT | C429N | AAT | M438D | GAT | F446Q | CAG |
| Y403Q | CAG | A412H | CAT | D421A | GCT | C429P | CCT | M438E | GAG | F446R | CGG |
| Y403R | CGG | A412I | ATT | D421E | GAG | C429R | CGG | M438G | GGG | F446T | ACT |
| Y403S | TCT | A412L | CTG | D421G | GGT | C429S | TCG | M438L | TTG | F446V | GTT |
| Y403T | ACG | A412N | AAT | D421H | CAT | C429T | ACT | M438N | AAT | F446W | TGG |
| S404A | GCT | A412P | CCT | D421I | ATT | C429V | GTT | M438P | CCT | Y447D | GAT |
| S404C | TGT | A412Q | CAG | D421K | AAG | C429W | TGG | M438Q | CAG | Y447E | GAG |
| S404D | GAT | A412R | CGG | D421L | TTG | C429Y | TAT | M438R | AGG | Y447F | TTT |
| S404F | TTT | A412S | AGT | D421M | ATG | I430A | GCT | M438S | TCG | Y447G | GGT |
| S404G | GGT | A412V | GTT | D421N | AAT | I430D | GAT | M438T | ACT | Y447I | ATT |
| S404H | CAT | A412W | TGG | D421Q | CAG | I430E | GAG | M438V | GTG | Y447K | AAG |
| S404L | CTT | D413A | GCG | D421R | CGG | I430G | GGG | M438W | TGG | Y447L | CTT |
| S404M | ATG | D413E | GAG | D421S | TCG | I430H | CAT | M438Y | TAT | Y447M | ATG |
| S404N | AAT | D413F | TTT | D421T | ACT | I430K | AAG | E439A | GCT | Y447N | AAT |
| S404P | CCT | D413G | GGT | D421W | TGG | I430L | TTG | E439C | TGT | Y447P | CCT |
| S404R | AGG | D413H | CAT | D421Y | TAT | I430M | ATG | E439F | TTT | Y447Q | CAG |
| S404T | ACG | D413I | ATT | V422A | GCT | I430N | AAT | E439G | GGG | Y447R | AGG |
| S404V | GTG | D413K | AAG | V422C | TGT | I430P | CCT | E439H | CAT | Y447T | ACT |
| S404W | TGG | D413L | CTG | V422D | GAT | I430R | AGG | E439K | AAG | Y447V | GTT |
| S404Y | TAT | D413N | AAT | V422E | GAG | I430S | TCT | E439L | CTT | Y447W | TGG |
| T405A | GCG | D413P | CCG | V422G | GGG | I430T | ACT | E439N | AAT | | |
| T405C | TGT | D413Q | CAG | V422H | CAT | I430V | GTT | E439P | CCT | | |
| T405F | TTT | D413R | CGT | V422I | ATT | I430W | TGG | E439Q | CAG | | |
| T405G | GGG | D413S | TCG | V422L | CTG | D431A | GCT | E439R | CGG | | |
| T405I | ATT | D413T | ACT | V422M | ATG | D431E | GAG | E439S | TCG | | |
| T405K | AAG | D413W | TGG | V422N | AAT | D431G | GGT | E439T | ACT | | |
| T405L | TTG | V414A | GCG | V422P | CCT | D431H | CAT | E439V | GTT | | |
| T405M | ATG | V414D | GAT | V422Q | CAG | D431I | ATT | E439W | TGG | | |
| T405P | CCG | V414E | GAG | V422R | CGT | D431K | AAG | T440A | GCT | | |
| T405Q | CAG | V414F | TTT | V422S | TCG | D431L | CTT | T440D | GAT | | |
| T405R | CGT | V414G | GGT | V422T | ACT | D431N | AAT | T440E | GAG | | |
| T405S | TCT | V414H | CAT | V422W | TGG | D431P | CCT | T440F | TTT | | |
| T405V | GTG | V414I | ATT | V422Y | TAT | D431Q | CAG | T440G | GGG | | |
| T405W | TGG | V414K | AAG | C423A | GCT | D431R | CGT | T440H | CAT | | |
| T405Y | TAT | V414L | TTG | C423D | GAT | D431S | TCT | T440I | ATT | | |
| L406A | GCT | V414M | ATG | C423E | GAG | D431V | GTT | T440L | CTT | | |
| L406C | TGT | V414Q | CAG | C423F | TTT | D431W | TGG | T440M | ATG | | |
| L406D | GAT | V414R | AGG | C423G | GGG | D431Y | TAT | T440P | CCT | | |
| L406E | GAG | V414S | TCG | C423H | CAT | A432C | TGT | T440Q | CAG | | |
| L406F | TTT | V414T | ACT | C423L | CTG | A432E | GAG | T440R | AGG | | |
| L406G | GGT | V414Y | TAT | C423M | ATG | A432F | TTT | T440S | AGT | | |
| L406I | ATT | K415A | GCG | C423P | CCT | A432G | GGG | T440V | GTG | | |
| L406N | AAT | K415C | TGT | C423Q | CAG | A432H | CAT | T440Y | TAT | | |
| | | K415D | GAT | C423R | AGG | A432I | ATT | E441A | GCT | | |
| | | K415E | GAG | C423S | TCG | A432K | AAG | E441C | TGT | | |

[0721] 2. Expression

[0722] For expression of each mutant, HZ24-PH20-IRES-SEAP plasmid DNA containing cDNA encoding one of the variant PH20 or encoding wildtype PH20 was transfected into monolayer CHO-S cells (Invitrogen, Cat. No. 11619-012) using Lipofectamine 2000 (Invitrogen, Cat. No. 11668-027) according to the protocol suggested by the manufacturer. CHO-S cells were seeded the night before transfection and grown in DMEM with 10% FBS to be 80% confluent the next day. Then, the medium of the CHO-S cells was replaced with Opti-MEM. A mixture of plasmid DNA and lipofectamine was made (0.2 μg DNA and 0.5 μL Lipofetamine). The Lipofectamine/DNA mixture was added to CHO-S cells and incubated overnight. The next day, the cells were supplemented with CD-CHO serum free medium (Invitrogen, Cat. No. 10743-029). Supernatant from transfected cells was collected at various time points after transfection, and generally 96 hours after transfection. The supernatant, containing the variant PH20 protein or wildtype PH20 having a sequence of amino acids set forth in SEQ ID NO:3, was stored at −20° C. Activities of the supernatants were screened as described in the following examples.

### Example 3

### Screening Assay to Assess Hyaluronidase Activity of PH20 Variants

[0723] 1. Generation of Biotinylated HA (bHA) Substrate

[0724] A 1.2-MDa HA (Lifecore) was biotinylated for use as a substrate in the hyaluronidase activity assay. First, 1.2 grams (g) of 1.2 MDa HA was dissolved at 4° C. in 600 mL ddH₂0 for a week at a concentration of 2 mg/mL with stirring. Next, 645.71 mg Biotin Hydrazide was dissolved in 100 mL DMSO to a concentration of 25 mM (6.458 mg/mL, 247.8 mg in 38.37 mL DMSO). The biotin solution was warmed briefly at 37° C. until the solution was clear. Also, 368.61 mg Sulfo-NHS in 20 mL ddH₂O was dissolved to make a 100× solution (18.4 mg/mL Sulfo-NHS). A 30 mM (1000×) water-soluble carbodiimide EDC solution was made by dissolving 17.63 mg EDC in 3 mL ddH20 at a concentration of 5.7513 mg/mL right before the reaction was started.

[0725] To four (4) 1000-mL sterile capped bottles, the following components were added at room temperature (RT) and in the following order with stirring: 1) 200 mL of 2 mg/mL HA solution; 2) 80 mL of 0.5M MES, pH 5.0 with gentle mixing; and 3) 91.6 mL of ddH₂O with gentle mixing. Next, 24 mL of 25 mM Biotin-Hydrazide and 4 mL of 100× Sulfo-NHS solution were added sequentially, immediately followed by the addition of 500 μL EDC. After the addition of each component, the solution was mixed by inverting three times and stirring. After the addition of the last component, the solution was mixed by stirring overnight at 4° C. Then, Guanidine hydrochloride was added to a final concentration of 4 M by adding 38.2 g per 100 mL and was allowed to dissolve completely before adjusting the solution volume to 600 mL with ddH₂O.

[0726] For dialysis, 200 mL from each batch of the conjugated HA guanidine hydrochloride solution was transferred into dialysis membranes. Over the course of three days, the solution was dialyzed against ddH₂O with a change in ddH₂O at least six times. The resulting volume of about 840 mL was adjusted to a final volume of 1000 mL with ddH₂O. The final concentration of the biotinylated hyaluronan (bHA) was 0.4 mg/mL.

[0727] 2. Hyaluronidase Activity Assay

[0728] The enzyme assay was a modification of the method described by Frost et al. (1997) (A Microtiter-Based Assay for Hyaluronidase Activity Not Requiring Specialized Reagents. Analytical Biochemistry (1997) 251:263-269) that provides a measure of PH20 hyaluronidase activity.

[0729] First, biotinylated HA (bHA) substrate was bound to plastic microtiter plates to generate assay plates. Briefly, 100 μl of b-HA at 1 mg/mL in 0.5 M carbonate buffer (pH 9.6) was dispensed into each well of a high bind microplate (Immunolon 4 HBX extra high binding; Thermo Scientific). The plate was covered with a plate sealer and stored between 2-8° C. for 24-48 hours.

[0730] Then, the assay plate was washed with 1× phosphate buffered saline (PBS) wash buffer containing 0.05% (v/v) Tween 20 (PBST). PBST was generated from 1×PBS (generated from Catalog No. P5368, Sigma (10 mM Phosphate Buffer, 2.7 mM Potassium Chloride, 137 mM Sodium Chloride, pH 7.4) by placing the contents of one packet of PBS into a 1-L graduated cylinder with 800 mL deionized water, dissolved by stirring or shaking and adding sufficient quantity of water to 1 L) by adding 500 μl Tween 20 (Catalog No. 6505; EMD Bioscience) to 900 mL of 1×PBS and adding sufficient quantity of water to 1 L. Washing was done using the BioTek ELx405 Select CW plate washer (BioTek) by washing five (5) times with 300 μl PBST wash buffer per well for each wash. At the end of each wash, the plate was tapped on a paper towel to remove excess liquid from each well. Prior to incubation with samples, 200 μl Blocking Buffer (1.0% w/v Bovine Serum Albumin (BSA) in PBS) was added to each well and the assay plate was incubated at 37° C. for approximately 1 hour prior. The Blocking buffer was generated by adding 2.5 g of BSA (Catalog No. 001-000-162; Jackson Immuno Research) to 200 mL 1×PBS, stirring, adding a sufficient quantity of 1×PBS to 250 mL and filtering through an 0.2 μM PES filter unit.

[0731] Transfected variant or wildtype PH20 supernatants generated as described in Example 1 were diluted in duplicate 1:25 in assay diluent buffer (pH 7.4 HEPES buffer; 10 mM HEPES, 50 mM NaCl, 1 mM CaCl₂, 1 mg/mL BSA, pH 7.4, 0.05% Tween-20) in uncoated 4XHB high bound microplates. For the standard curve, 1:3 serial dilutions of rHuPH20 (generated as described in Example 1 with a specific activity of 145 U/mL) were made in assay diluent buffer in duplicate starting from 3 U/mL for standards as follows: 3 U/mL, 1 U/mL, ⅓ U/mL, 1/9 U/mL, 1/27 U/mL, 1/81 U/mL, and 1/243 U/mL. One hundred microliters (100 μl) of each standard and sample were transferred to the assay plates and incubated for approximately 1.5 hours at 37° C.

[0732] After the incubation, the plate was washed with PBST using the BioTek ELx405 Select CW plate washer by washing five (5) times with 300 μl PBST wash buffer per well for each wash. At the end of each wash, the plate was tapped on a paper towel to remove excess liquid from each well. Then, 100 μl of 1:5000 diluted Streptavidin-HRP (SA-HRP) was added to each well of the plate and incubated at ambient temperature for approximately 1 hour. For the dilution, a 1 mg/mL stock of Streptavidin-HRP conjugate (Catalog No. 21126; Thermo Scientific) was diluted 1:5000 into dilution buffer (1 mg/mL BSA, 0.025% Tween20, 137 mM NaCl, 20 mM Tris pH 7.5). After the incubation, the plate was washed with PBST using the BioTek ELx405 Select CW plate washer by washing five (5) times with 300 μl PBST wash buffer per well for each wash. At the end of each wash, the plate was tapped on a paper towel to remove excess liquid from each well. Then, 100 μl of TMB solution (Catalog No. 52-00-03, KPL; ambient temperature and protected from light) was added to each well for approximately five (5) minutes at room temperature or until an optimal color development was yielded. To stop the reaction, 100 μl 1.0 N Sulfuric Acid or TMB Stop solution (Catalog No. 50-85-06) were added to each well and the plates tapped to mix. Optical density was measured at 450 nm within 30 minutes of adding the stop solution. Since more PH20 in a standard or sample would lead to less bHA available to bind SA-HRP, the optical density (450 nm) value was inversely proportional to the concentration of hyaluronidase activity in each specimen.

[0733] 3. SEAP Activity

[0734] Activity of secreted alkaline phosphatase (SEAP) in the cell culture supernatant also was measured using a colorimetric assay of placental alkaline phosphatase using pNPP as a phosphatase substrate (Anaspec SensoLyte pNPP SEAP kit; Catalog No. 72144, Anaspec) according to the manufacturer's instructions. The absorbance signal was measured at optical density (OD) of 405 nm

[0735] The criteria for the high throughput (HTP) screening were that the transfected supernatant resulted in a SEAP signal of ≧0.1 and the signal for the rHuPH20 wildtype control produced a signal of ≧1 U/mL. Also, the criteria for each screen were that the standard curves had a signal to noise ratio (S/N) for the 0 U/mL standard versus the 3 u/mL standard at OD₄₀₅ of ≧5, had less than three (3) standards with a coefficient of variation (CV) ≧10%, and at least four (4) of the standards were in the linear range.

### Example 4

### PH20 Variants with Altered Hyaluronidase Activity

[0736] Each generated variant was screened for hyaluonidase activity as described in Example 3. The secreted alkaline phosphatase (SEAP) expression was also measured and used to normalize PH20 activity of each variant to the PH20 wildtype. Mutants that exhibited altered hyaluronidase activity compared to wildtype were identified.

[0737] 1. Active Mutants

[0738] Active mutants in which at least one duplicate sample exhibited greater than 40% of wildtype activity when normalized to SEAP activity were selected. The identified active mutants are set forth in Table 7. In the Table, the amino acid replacement compared to the sequence of amino acids of PH20 set forth in SEQ ID NO:3 is indictated. The Table sets forth the average hyaluronidase activity of tested duplicates normalized by SEAP values compared to average of wildtype PH20 activities in each plate, which also were normalized by their own SEAP values. For example, a value of 0.40 indicates that the variant exhibits 40% of the hyaluronidase activity of wildtype PH20, a value of 1 indicates that the variant exhibits a similar hyaluronidase activity of wildtype and a value of 3.00 indicates that the variant exhibits 300% of the hyaluronidase activity of wildtype PH20 or 3-fold increased activity compared to wildtype.

TABLE 7
ACTIVE MUTANTS

| | AvgNorm |
|---|---|
| mutant | Act. |
| L001A | 0.95 |
| L001C | 0.89 |
| L001E | 0.55 |
| L001F | 0.41 |
| L001G | 0.62 |
| L001H | 1.90 |
| L001K | 1.39 |
| L001N | 0.87 |
| L001P | 0.92 |
| L001Q | 3.27 |
| L001R | 0.72 |
| L001S | 0.74 |
| L001T | 0.99 |
| L001V | 1.00 |
| L001W | 0.88 |
| N002A | 0.61 |
| N002C | 0.4 |
| G291C | 0.27 |
| N002G | 0.44 |
| N002L | 0.46 |
| N002P | 0.54 |
| N002Q | 0.84 |
| N002S | 0.78 |
| N002T | 1.05 |
| N002V | 0.65 |
| F003E | 0.42 |
| F003H | 0.68 |
| F003L | 0.59 |
| F003Y | 0.50 |
| R004A | 0.73 |
| R004I | 0.54 |
| R004S | 0.60 |
| R004T | 0.66 |
| R004V | 1.09 |
| A005H | 0.44 |
| P006A | 0.78 |
| P006H | 0.58 |
| P006K | 0.80 |
| P006L | 0.76 |
| P006N | 0.40 |
| P006Q | 0.89 |
| P006R | 0.56 |
| P007M | 0.57 |
| V008I | 1.17 |
| V008L | 0.53 |
| V008M | 0.47 |
| V008P | 0.33 |
| I009K | 0.69 |
| I009L | 1.08 |
| I009R | 0.53 |
| I009S | 0.98 |
| I009V | 0.84 |
| P010D | 0.62 |
| P010E | 0.66 |
| P010G | 0.55 |
| P010H | 0.43 |
| P010N | 0.55 |
| P010Q | 0.89 |
| P010R | 0.73 |
| P010S | 0.55 |
| P010W | 0.59 |
| N011D | 0.54 |
| N011G | 0.45 |
| N011H | 0.69 |
| N011K | 0.58 |
| N011S | 0.39 |
| M310F | 0.30 |
| V012A | 0.56 |
| V012E | 1.86 |
| V012I | 0.68 |
| V012K | 0.65 |
| V012L | 0.44 |
| V012N | 0.46 |
| V012R | 0.50 |
| V012S | 0.75 |
| V012T | 1.50 |
| P013H | 0.46 |
| P013S | 0.68 |
| P013T | 0.90 |
| P013Y | 0.51 |
| F014D | 0.64 |
| F014I | 0.42 |
| F014M | 0.47 |
| F014V | 0.46 |
| L015A | 0.65 |
| L015M | 0.45 |
| L015V | 2.20 |
| A020S | 0.50 |
| S022H | 0.57 |
| S022M | 0.49 |
| S022T | 0.48 |
| S022Y | 0.45 |
| E023D | 0.97 |
| F024A | 0.69 |
| F024E | 3.99 |
| F024G | 0.75 |
| F024H | 2.07 |
| F024I | 0.70 |
| F024K | 0.96 |
| F024L | 0.62 |
| F024M | 0.85 |
| F024N | 0.60 |
| F024R | 1.22 |
| F024T | 1.18 |
| F024V | 1.15 |
| F024Y | 0.90 |
| L026A | 1.30 |
| L026E | 3.22 |
| L026G | 0.81 |
| L026H | 0.97 |
| L026I | 0.51 |
| L026K | 1.88 |
| L026M | 1.43 |
| L026P | 0.55 |
| L026Q | 1.44 |
| L026R | 1.43 |
| L026S | 0.78 |
| L026T | 0.87 |
| L026V | 0.52 |
| L026W | 0.53 |
| L026Y | 0.52 |
| G027A | 0.79 |
| G027D | 1.22 |
| G027E | 1.18 |
| G027F | 0.61 |
| G027H | 1.11 |
| G027I | 0.41 |
| G027K | 2.71 |
| G027L | 0.76 |
| G027P | 0.46 |
| G027Q | 1.12 |
| G027R | 1.88 |
| G027S | 0.94 |
| G027T | 0.61 |
| G027W | 0.76 |
| K028A | 0.78 |
| K028D | 0.62 |
| K028E | 0.54 |
| K028F | 0.75 |
| K028I | 0.55 |
| K028L | 0.51 |
| K028M | 0.67 |
| K028N | 0.58 |
| K028P | 0.40 |
| K028R | 0.71 |
| K028S | 0.46 |
| K028T | 0.68 |
| K028V | 0.76 |
| K028W | 0.51 |
| F029A | 0.90 |
| F029E | 4.03 |
| F029G | 1.05 |
| F029H | 0.82 |
| F029I | 1.53 |
| F029K | 1.34 |
| F029L | 2.36 |
| F029M | 2.08 |
| F029P | 3.79 |
| F029R | 1.24 |
| F029S | 2.21 |
| F029T | 0.85 |
| F029V | 1.65 |
| F029W | 0.48 |
| D030A | 1.12 |
| D030F | 0.84 |
| D030G | 2.02 |
| D030H | 1.69 |
| D030K | 2.63 |
| D030L | 1.32 |
| D030M | 1.85 |
| D030P | 1.19 |
| D030Q | 0.84 |
| D030R | 1.82 |
| D030S | 1.62 |
| D030T | 0.57 |
| D030V | 0.46 |
| D030W | 0.62 |
| E031A | 2.05 |
| E031C | 2.95 |
| E031G | 1.27 |
| E031H | 2.74 |
| E031I | 3.89 |
| E031K | 3.13 |
| E031L | 2.62 |
| E031P | 1.51 |
| E031R | 2.27 |
| E031S | 1.70 |
| E031T | 3.96 |
| E031V | 4.57 |
| E031W | 1.26 |
| E031Y | 1.13 |
| P032A | 0.92 |
| P032C | 0.40 |
| P032F | 2.71 |
| I326C | 0.39 |
| I331C | 0.27 |
| P032G | 1.60 |
| P032H | 2.08 |
| P032K | 1.04 |
| P032L | 0.82 |
| P032M | 0.67 |
| P032N | 0.70 |
| P032Q | 1.11 |
| P032R | 1.17 |
| P032S | 1.01 |
| P032T | 0.77 |
| P032V | 0.81 |
| P032W | 0.54 |
| P032Y | 1.01 |
| L033G | 0.57 |
| L033M | 0.69 |
| L033P | 0.87 |
| L033Q | 0.45 |
| L033R | 0.61 |
| L033S | 0.48 |
| L033T | 0.45 |
| L033W | 1.58 |
| D034A | 0.38 |
| D034E | 0.58 |
| D034H | 0.41 |
| D034K | 0.54 |
| D034Q | 0.59 |
| D034R | 1.17 |
| D034W | 0.46 |
| M035F | 0.87 |
| M035H | 0.60 |
| M035L | 0.52 |
| M035T | 0.83 |
| M035Y | 0.78 |
| S036A | 0.45 |
| S036D | 0.32 |
| S036G | 0.64 |
| S036H | 0.54 |
| S036K | 0.83 |
| S036L | 0.71 |
| S036R | 1.09 |
| Q347L | 0.39 |
| V351Q | 0.34 |
| S036T | 0.51 |
| L037F | 3.33 |
| L037I | 0.62 |
| L037K | 0.43 |
| L037M | 1.46 |
| L037P | 0.63 |
| L037R | 0.51 |
| L037V | 0.57 |
| F038Y | 1.29 |
| S039A | 1.06 |
| S039L | 0.80 |
| S039N | 2.32 |
| S039Q | 1.10 |
| S039R | 0.56 |
| S039T | 1.57 |
| S039Y | 0.56 |
| F040L | 0.92 |
| F040W | 1.11 |
| I041A | 0.67 |
| I041C | 0.53 |
| I041D | 0.78 |
| I041E | 0.51 |
| I041G | 0.76 |
| I041H | 0.77 |
| I041N | 0.40 |
| I041T | 1.47 |
| I041V | 0.73 |
| I041W | 0.66 |
| G042A | 0.64 |
| S043T | 0.43 |
| P044E | 0.59 |
| R045I | 0.45 |
| R045K | 0.53 |
| I046A | 1.04 |
| I046C | 0.37 |
| I046E | 0.43 |
| I046F | 0.73 |
| I046H | 0.82 |
| I046L | 1.08 |
| I046M | 1.00 |
| I046N | 0.66 |
| I046R | 2.29 |
| I046S | 0.64 |
| I046T | 0.55 |
| I046V | 1.01 |
| I046Y | 0.76 |
| N047A | 0.48 |
| N047D | 0.82 |
| N047F | 1.32 |
| N047G | 0.82 |
| N047H | 1.16 |
| N047K | 0.67 |
| N047M | 0.77 |
| N047Q | 0.69 |
| N047R | 0.84 |
| N047S | 0.85 |
| N047T | 1.49 |
| N047W | 0.63 |
| N047Y | 0.45 |
| A048F | 2.51 |
| A048G | 0.83 |
| A048H | 1.99 |
| A048I | 0.64 |
| A048K | 1.28 |
| A048M | 0.76 |
| A048N | 4.25 |
| A048Q | 1.05 |
| A048R | 0.66 |
| A048S | 1.06 |
| A048V | 0.60 |
| A048Y | 0.81 |
| T049I | 0.42 |
| T049K | 0.85 |
| T049R | 1.41 |
| T049S | 0.92 |
| T049V | 0.45 |
| G050A | 0.93 |
| G050C | 0.41 |
| G050D | 1.37 |
| G050E | 0.78 |
| G050H | 0.74 |
| G050L | 0.43 |
| G050M | 0.47 |
| G050Q | 0.86 |
| G050R | 0.86 |
| G050S | 1.24 |
| G050V | 0.3 |
| G050Y | 0.58 |
| Q051N | 0.60 |
| Q051S | 0.46 |
| G052N | 0.89 |
| G052P | 0.43 |
| G052Q | 3.71 |
| G052R | 0.53 |
| G052S | 1.32 |
| E375I | 0.36 |
| F380V | 0.39 |
| G052T | 0.49 |
| T054A | 0.43 |
| T054F | 0.56 |
| T054N | 0.48 |
| T054Q | 0.91 |
| T054S | 0.70 |
| T054V | 0.66 |
| V058C | 0.55 |
| V058G | 0.54 |
| V058H | 1.09 |
| V058I | 0.57 |
| V058K | 4.08 |
| V058L | 1.54 |
| V058N | 0.49 |
| V058P | 0.90 |
| V058Q | 4.54 |
| V058R | 1.92 |
| V058S | 0.83 |
| V058W | 0.65 |
| V058Y | 1.07 |
| D059Q | 0.40 |
| D059N | 1.27 |
| R060K | 0.69 |
| L061I | 0.42 |
| L061M | 0.73 |
| L061V | 0.59 |
| Y063A | 0.63 |
| Y063H | 1.07 |
| Y063I | 1.03 |
| Y063K | 1.36 |
| Y063L | 1.33 |
| Y063M | 1.32 |
| Y063N | 0.96 |
| Y063R | 1.40 |
| Y063S | 1.00 |
| Y063T | 1.07 |
| Y063V | 0.43 |
| Y063W | 1.53 |
| P065R | 0.57 |
| Y066H | 0.47 |
| Y066R | 0.51 |
| I067F | 1.00 |
| I067L | 0.45 |
| I067R | 0.24 |
| I067V | 1.80 |
| I067Y | 0.55 |
| D068E | 0.72 |
| D068H | 2.06 |
| D068K | 1.08 |
| D068L | 0.43 |
| D068P | 0.50 |
| D068Q | 1.67 |
| D068R | 0.70 |
| D068S | 0.81 |
| D068T | 0.75 |
| S069A | 22.06 |
| S069C | 1.97 |
| S069E | 1.48 |
| S069F | 8.75 |
| S069G | 6.06 |
| S069I | 3.12 |
| S069L | 3.44 |
| S069M | 2.67 |
| S069P | 8.14 |
| S069R | 14.06 |
| S069T | 0.58 |
| S069W | 2.18 |
| S069Y | 2.71 |
| I070A | 27.00 |
| I070C | 2.57 |
| I070F | 5.69 |
| I070G | 6.22 |
| I070H | 9.09 |
| I070K | 14.64 |
| I070L | 3.05 |
| I070N | 6.19 |
| I070P | 3.03 |
| I070R | 13.95 |
| I070S | 3.63 |
| I070T | 5.43 |
| I070V | 6.34 |
| I070Y | 1.26 |
| T071A | 0.86 |
| T071D | 0.50 |
| T071G | 1.41 |
| T071H | 0.93 |
| T071L | 1.09 |
| T071M | 0.89 |
| T071N | 1.21 |
| T071Q | 0.68 |
| T071R | 2.17 |
| T071S | 1.54 |
| G072A | 0.45 |
| G072D | 0.60 |
| S395W | 0.4 |
| G072E | 0.69 |
| G072H | 0.46 |
| G072K | 1.39 |
| G072L | 0.43 |
| G072M | 3.11 |
| G072Q | 2.33 |
| G072R | 0.65 |
| G072S | 0.51 |
| V073A | 1.38 |
| V073C | 0.84 |
| V073D | 0.94 |
| V073G | 1.17 |
| V073H | 1.54 |
| V073K | 1.42 |
| V073L | 1.59 |
| V073M | 0.68 |
| V073Q | 0.96 |
| V073R | 0.72 |
| V073S | 0.86 |
| K297R | 0.34 |
| S401Q | 0.39 |
| V073T | 1.34 |
| V073W | 1.91 |
| T074A | 2.28 |
| T074C | 2.18 |
| T074E | 1.38 |
| T074F | 1.43 |
| T074G | 2.75 |
| T074H | 1.40 |
| T074K | 1.29 |
| T074L | 1.43 |
| T074M | 0.52 |
| T074N | 2.12 |
| T074P | 2.45 |
| T074R | 2.22 |
| T074S | 1.80 |
| T074V | 2.27 |
| T074W | 2.13 |
| V075A | 0.71 |
| V075C | 0.46 |
| V075F | 2.00 |
| V075H | 0.62 |
| V075L | 5.22 |
| V075M | 1.16 |
| V075N | 0.81 |
| V075Q | 1.51 |
| V075R | 3.02 |
| V075S | 0.76 |
| V075T | 4.34 |
| V075Y | 0.63 |
| G077H | 0.32 |
| I079L | 1.44 |
| I079T | 0.79 |
| I079V | 1.01 |
| Q081P | 0.60 |
| K082A | 0.94 |
| K082E | 0.50 |
| K082G | 0.64 |
| K082H | 0.44 |
| K082I | 1.01 |
| K082L | 0.87 |
| K082M | 0.58 |
| K082N | 0.96 |
| K082Q | 0.76 |
| K082R | 0.85 |
| K082S | 0.62 |
| K082T | 0.56 |
| K082Y | 0.32 |
| K082V | 0.57 |
| I083F | 0.57 |
| I083G | 1.05 |
| I083L | 0.93 |
| I083N | 0.82 |
| I083Q | 1.07 |
| I083R | 0.45 |
| I083S | 0.79 |
| I083T | 0.95 |
| I083V | 0.99 |
| S084D | 0.98 |
| S084E | 0.52 |
| S084F | 0.72 |
| S084G | 8.68 |
| S084H | 0.96 |
| S084I | 0.90 |
| S084L | 0.92 |
| S084M | 0.77 |
| S084N | 0.89 |
| S084P | 0.57 |
| S084Q | 0.86 |
| S084R | 1.89 |
| S084T | 0.82 |
| S084W | 0.86 |
| S084Y | 0.30 |
| S221I | 0.35 |
| L085V | 0.42 |
| Q086A | 2.70 |
| Q086D | 0.88 |
| Q086E | 1.18 |
| Q086F | 0.54 |
| Q086G | 1.02 |
| Q086H | 1.70 |
| Q086I | 0.65 |
| Q086K | 0.97 |
| Q086L | 0.92 |
| Q086M | 1.06 |
| Q086N | 1.28 |
| Q086P | 0.42 |
| Q086R | 0.93 |
| Q086S | 0.85 |
| Q086T | 0.58 |
| Q086V | 0.97 |
| Q086W | 1.21 |
| D087A | 1.00 |
| D087C | 1.77 |
| D087E | 0.86 |
| D087G | 1.00 |
| D087H | 0.72 |
| D087I | 0.53 |
| D087L | 0.55 |
| D087M | 0.58 |
| D087P | 0.31 |
| D087Q | 1.05 |
| D087R | 1.28 |
| D087S | 0.99 |
| D087T | 1.70 |
| A412H | 0.39 |
| D413H | 0.31 |
| V414K | 0.3 |
| K415V | 0.39 |
| D087V | 0.66 |
| D087Y | 2.72 |
| L089C | 1.46 |
| L089R | 0.34 |
| L089K | 0.45 |
| L089M | 0.63 |
| D090A | 1.48 |
| D090E | 1.15 |
| D090G | 0.41 |
| D090H | 1.24 |
| D090I | 1.10 |
| D090K | 1.36 |
| D090L | 1.15 |
| D090N | 1.18 |
| D090Q | 1.11 |
| D090R | 1.49 |
| D090S | 1.15 |
| D090T | 1.02 |
| D090W | 0.81 |
| K091A | 0.89 |
| K091Q | 0.43 |
| K091R | 0.67 |
| A092C | 1.97 |
| A092H | 0.22 |
| A092L | 1.29 |
| A092M | 0.86 |
| A092T | 0.70 |
| A092V | 1.09 |
| K093D | 0.71 |
| K093E | 0.83 |
| K093F | 0.50 |
| K093G | 0.97 |
| K093H | 0.61 |
| K093I | 3.25 |
| R248H | 0.4 |
| K093L | 1.53 |
| K093M | 0.70 |
| K093N | 0.71 |
| K093Q | 0.84 |
| K093R | 1.52 |
| K093S | 1.25 |
| K093T | 3.93 |
| K093V | 0.24 |
| K094A | 0.64 |
| K094D | 0.93 |
| K094E | 0.79 |
| K094F | 0.59 |
| K094H | 0.72 |
| K094L | 0.52 |
| K094M | 0.66 |
| K094N | 0.99 |
| K094Q | 1.22 |
| K094R | 3.94 |
| K094S | 0.94 |
| K094T | 1.14 |
| I096D | 0.69 |
| V102K | 1.03 |
| V102L | 0.71 |
| V102M | 0.77 |
| V102N | 1.02 |
| V102Q | 1.03 |
| V102R | 0.94 |
| V102S | 1.41 |
| V102T | 1.26 |
| V102W | 0.76 |
| D103N | 0.39 |
| N104A | 0.69 |
| N104C | 0.41 |
| N104G | 0.48 |
| N104K | 0.88 |
| N104M | 0.61 |
| N104R | 1.25 |
| N104S | 1.03 |
| N104T | 0.71 |
| L105A | 0.54 |
| L105G | 0.51 |
| L105I | 0.94 |
| L105P | 0.84 |
| L105Q | 0.90 |
| L105R | 0.65 |
| L105S | 0.61 |
| L105T | 0.51 |
| L105W | 0.34 |
| L105V | 0.99 |
| G106V | 0.43 |
| M107F | 0.91 |
| M107I | 0.67 |
| M107L | 1.32 |
| A108G | 0.47 |
| I110V | 0.51 |
| E114A | 1.44 |
| E114G | 0.73 |
| E114H | 0.75 |
| E114M | 0.44 |
| E114S | 0.69 |
| P117D | 0.56 |
| T118H | 0.47 |
| T118K | 0.53 |
| T118L | 1.09 |
| T118M | 0.53 |
| T118N | 0.67 |
| T118Q | 3.37 |
| T118V | 0.79 |
| W119F | 0.53 |
| W119P | 0.36 |
| W119Y | 1.08 |
| A120D | 0.76 |
| A120F | 2.62 |
| A120G | 1.03 |
| A120H | 1.11 |
| A120I | 1.33 |
| A120L | 1.25 |
| A120N | 0.81 |
| A120P | 0.42 |
| A120R | 0.82 |
| A120S | 1.21 |
| A120T | 0.62 |
| A120V | 1.53 |
| A120W | 0.59 |
| A120Y | 1.95 |
| N122M | 0.56 |
| K124L | 0.34 |
| K124R | 0.62 |
| P125H | 0.43 |
| P125R | 0.63 |
| P125S | 0.54 |
| D127A | 0.89 |
| D127E | 1.31 |
| D127G | 0.97 |
| D127H | 2.33 |
| D127L | 0.84 |
| D127M | 0.4 |
| D127N | 1.69 |
| D127Q | 1.21 |
| D127R | 0.51 |
| D127S | 0.77 |
| D127T | 1.11 |
| D127V | 0.56 |
| D127W | 0.44 |
| V128A | 0.53 |
| V128C | 0.68 |
| V128G | 0.49 |
| V128I | 1.25 |
| V128K | 1.16 |
| V128L | 0.95 |
| V128Q | 0.55 |
| V128R | 0.74 |
| V128S | 0.53 |
| V128W | 0.50 |
| K130I | 0.50 |
| K130R | 1.42 |
| N131C | 0.60 |
| N131E | 0.44 |
| N131F | 0.63 |
| N131G | 2.47 |
| N131H | 0.80 |
| N131I | 1.40 |
| N131L | 0.82 |
| N131M | 0.99 |
| N131Q | 1.24 |
| N131R | 2.81 |
| N131S | 0.76 |
| N131T | 1.02 |
| N131V | 2.08 |
| N131Y | 0.85 |
| R132A | 0.68 |
| R132C | 0.58 |
| R132E | 0.70 |
| R132F | 0.60 |
| R132H | 0.66 |
| K279A | 0.27 |
| E285A | 0.34 |
| R132I | 0.56 |
| R132K | 1.05 |
| R132L | 0.76 |
| R132N | 1.28 |
| R132Q | 0.69 |
| R132S | 0.79 |
| R132T | 0.61 |
| R132V | 0.73 |
| R132Y | 0.78 |
| S133I | 0.54 |
| I134L | 1.04 |
| I134T | 0.60 |
| I134V | 1.08 |
| E135A | 0.99 |
| E135C | 0.77 |
| E135D | 2.68 |
| E135F | 0.73 |
| E442L | 0.4 |
| E135G | 2.79 |
| E135H | 0.79 |
| E135K | 1.15 |
| E135L | 0.82 |
| E135N | 0.56 |
| E135Q | 1.59 |
| E135R | 2.08 |
| E135S | 1.13 |
| E135W | 0.63 |
| E135Y | 0.50 |
| L136A | 0.73 |
| L136C | 0.56 |
| L136D | 0.47 |
| L136F | 0.96 |
| L136H | 1.00 |
| L136I | 0.65 |
| L136M | 1.05 |
| L136N | 0.48 |
| L136Q | 0.61 |
| L136R | 0.74 |
| L136S | 0.80 |
| L136T | 0.72 |
| L136W | 1.11 |
| V137A | 0.48 |
| V137I | 1.01 |
| V137T | 0.51 |
| Q138A | 0.69 |
| Q138C | 0.65 |
| Q138H | 0.71 |
| Q138I | 0.54 |
| Q138L | 0.59 |
| Q138M | 0.68 |
| Q138N | 0.61 |
| Q138R | 0.53 |
| Q138S | 0.48 |
| Q138W | 0.41 |
| Q138Y | 0.60 |
| Q139A | 0.92 |
| Q139C | 0.44 |
| Q139D | 0.48 |
| Q139E | 0.94 |
| Q139F | 0.53 |
| Q139G | 0.65 |
| Q139H | 0.56 |
| Q139K | 0.73 |
| Q139L | 0.70 |
| Q139M | 0.95 |
| Q139R | 0.79 |
| Q139S | 0.81 |
| Q139T | 1.31 |
| Q139V | 0.77 |
| Q140A | 0.96 |
| Q140C | 0.50 |
| Q140D | 0.59 |
| Q140F | 0.66 |
| Q140G | 0.73 |
| Q140H | 0.84 |
| Q140I | 0.75 |
| Q140K | 0.93 |
| Q140L | 0.51 |
| Q140M | 0.80 |
| Q140R | 0.85 |
| Q140V | 0.61 |
| Q140W | 0.59 |
| Q140Y | 0.41 |
| N141A | 1.12 |
| N141D | 1.09 |
| N141E | 0.67 |
| N141F | 0.81 |
| N141G | 1.15 |
| N141H | 2.03 |
| N002I | 0.37 |
| G297A | 0.57 |
| N141L | 0.61 |
| N141M | 0.48 |
| N141Q | 1.16 |
| N141R | 1.40 |
| N141S | 0.72 |
| N141T | 0.45 |
| N141V | 0.50 |
| N141W | 0.83 |
| N141Y | 1.55 |
| V142C | 0.61 |
| V142D | 0.71 |
| V142E | 0.87 |
| V142G | 0.98 |
| V142H | 1.11 |
| V142I | 0.81 |
| V142K | 1.40 |
| V142L | 0.75 |
| V142M | 0.76 |
| V142N | 0.98 |
| V142P | 0.88 |
| V142Q | 1.04 |
| V142R | 1.53 |
| V142S | 0.93 |
| V142T | 1.19 |
| Q143E | 0.77 |
| Q143G | 0.62 |
| Q143I | 0.44 |
| Q143K | 1.30 |
| I009Q | 0.4 |
| Q143L | 0.56 |
| Q143N | 0.73 |
| Q143V | 0.57 |
| L144T | 1.02 |
| L144W | 0.79 |
| S145A | 0.58 |
| S145C | 0.44 |
| S145D | 0.48 |
| S145E | 0.56 |
| S145G | 0.94 |
| S145H | 0.56 |
| S145L | 0.44 |
| S145M | 0.56 |
| S145N | 0.58 |
| S145P | 1.04 |
| S145R | 0.97 |
| L146A | 0.52 |
| L146C | 0.42 |
| G305N | 0.36 |
| M310Y | 0.38 |
| L146E | 0.50 |
| L146G | 0.62 |
| L146H | 0.78 |
| L146I | 0.82 |
| L146K | 0.84 |
| L146N | 0.57 |
| L146P | 0.93 |
| L146Q | 0.84 |
| L146R | 1.47 |
| L146S | 0.71 |
| L146T | 0.74 |
| L146V | 0.84 |
| L146Y | 0.80 |
| S312K | 0.38 |
| T147A | 1.20 |
| T147C | 0.47 |
| T147D | 0.71 |
| T147F | 1.24 |
| T147G | 1.05 |
| T147I | 0.85 |
| T147L | 1.30 |
| T147M | 0.79 |
| T147P | 1.09 |
| T147Q | 1.29 |
| T147R | 2.11 |
| T147S | 1.27 |
| T147V | 2.04 |
| T147W | 0.97 |
| T147Y | 1.04 |
| E148C | 0.66 |
| E148F | 0.42 |
| E148G | 1.05 |
| E148H | 1.24 |
| E148I | 0.73 |
| E148K | 1.63 |
| E148L | 0.85 |
| E148Q | 1.44 |
| E148R | 0.97 |
| E148S | 1.15 |
| E148T | 0.82 |
| E148V | 0.99 |
| E148W | 0.43 |
| E148Y | 0.95 |
| A149C | 1.15 |
| A149G | 0.52 |
| A149K | 0.51 |
| A149L | 0.88 |
| A149M | 0.88 |
| A149Q | 1.15 |
| A149R | 1.02 |
| A149S | 1.08 |
| A149T | 1.24 |
| A149V | 1.34 |
| T150A | 1.21 |
| T150C | 0.70 |
| T150D | 1.24 |
| T150E | 1.05 |
| T150F | 0.71 |
| T150G | 2.19 |
| T150I | 0.52 |
| T150L | 0.70 |
| T150N | 0.91 |
| T150P | 0.88 |
| T150R | 0.90 |
| T150S | 0.92 |
| T150W | 1.25 |
| T150Y | 1.36 |
| E151A | 1.27 |
| E151C | 1.00 |
| E151G | 1.06 |
| E151H | 1.34 |
| E151K | 2.05 |
| E151L | 1.03 |
| E151M | 1.26 |
| E151N | 0.95 |
| E151Q | 2.01 |
| D320L | 0.37 |
| E151R | 1.61 |
| E151S | 1.28 |
| E151T | 1.21 |
| E151V | 1.38 |
| E151W | 1.31 |
| E151Y | 1.31 |
| K152A | 0.51 |
| K152C | 0.52 |
| K152F | 0.61 |
| K152I | 0.65 |
| K152M | 0.75 |
| K152R | 1.85 |
| K152T | 1.20 |
| K152V | 0.82 |
| K152Y | 0.67 |
| A153I | 0.93 |
| A153L | 0.51 |
| K154R | 0.86 |
| K154T | 0.83 |
| K154V | 0.46 |
| Q155A | 0.91 |
| Q155C | 0.60 |
| Q155D | 1.49 |
| Q155F | 0.70 |
| Q155G | 1.61 |
| Q155H | 1.03 |
| Q155K | 1.57 |
| Q155L | 0.86 |
| Q155M | 0.97 |
| Q155R | 1.27 |
| Q155S | 0.77 |
| Q155T | 0.76 |
| Q155V | 0.73 |
| Q155W | 0.91 |
| E156A | 0.79 |
| E156D | 1.95 |
| E156G | 0.49 |
| E156I | 0.51 |
| E156L | 0.43 |
| E156M | 0.87 |
| E156Q | 0.84 |
| E156R | 0.43 |
| E156S | 0.62 |
| E156T | 0.69 |
| E156V | 0.45 |
| E156W | 0.49 |
| F157W | 0.61 |
| E158A | 0.56 |
| E158F | 0.51 |
| E158H | 0.54 |
| I326S | 0.95 |
| I331E | 0.34 |
| E158L | 0.44 |
| E158Q | 1.25 |
| E158S | 0.95 |
| K159A | 0.64 |
| K159D | 0.52 |
| K159E | 0.49 |
| K159H | 0.74 |
| K159L | 0.62 |
| K159M | 0.66 |
| K159N | 0.73 |
| K159Q | 0.92 |
| K159R | 0.88 |
| K159S | 0.67 |
| K159V | 0.41 |
| A160C | 0.61 |
| A160F | 0.79 |
| A160G | 0.75 |
| A160H | 0.47 |
| A160I | 0.43 |
| A160K | 0.91 |
| A160L | 0.67 |
| M035Q | 0.37 |
| A160M | 0.77 |
| A160N | 0.56 |
| A160Q | 0.65 |
| A160R | 0.89 |
| A160S | 1.35 |
| A160V | 0.73 |
| A160Y | 1.07 |
| G161A | 0.99 |
| G161C | 0.44 |
| G161D | 0.86 |
| G161E | 0.49 |
| G161R | 0.48 |
| S036N | 0.38 |
| G161S | 0.77 |
| G161V | 0.42 |
| K162A | 0.50 |
| K162D | 0.77 |
| K162E | 0.51 |
| V351C | 0.35 |
| W357K | 0.36 |
| K162G | 0.56 |
| K162H | 0.62 |
| K162L | 0.54 |
| K162M | 1.04 |
| K162P | 0.64 |
| K162Q | 0.58 |
| K162R | 0.52 |
| K162S | 0.47 |
| K162V | 0.52 |
| K162W | 1.01 |
| K162Y | 0.72 |
| D163A | 1.52 |
| D163E | 1.63 |
| D163G | 1.15 |
| D163K | 1.90 |
| D163L | 1.18 |
| D163Q | 1.40 |
| D163R | 1.80 |
| D163S | 1.34 |
| D163T | 1.13 |
| D163V | 0.76 |
| F164L | 1.13 |
| F164M | 1.66 |
| F164V | 1.23 |
| S043N | 0.34 |
| F164W | 0.72 |
| L165A | 0.48 |
| L165D | 5.79 |
| L165F | 1.23 |
| L165N | 2.19 |
| L165R | 0.59 |
| L165S | 1.31 |
| L165V | 1.22 |
| L165W | 1.14 |
| A371G | 0.38 |
| L165Y | 0.66 |
| V166A | 2.85 |
| V166C | 1.16 |
| V166E | 1.28 |
| V166F | 1.67 |
| V166G | 1.11 |
| V166H | 1.74 |
| V166L | 4.38 |
| V166Q | 3.61 |
| V166R | 5.56 |
| V166T | 4.26 |
| V166W | 1.26 |
| V166Y | 2.08 |
| E167A | 0.84 |
| E167D | 0.69 |
| E167G | 0.60 |
| E167H | 0.89 |
| E167K | 0.91 |
| E167M | 0.87 |
| E167N | 0.83 |
| E167P | 0.58 |
| E167R | 1.02 |
| E167S | 1.17 |
| E167T | 0.59 |
| E167Y | 0.55 |
| T168H | 0.46 |
| I169L | 2.08 |
| I169R | 0.54 |
| I169V | 0.74 |
| K170N | 0.72 |
| K170R | 2.58 |
| K170V | 0.58 |
| L171I | 0.73 |
| L171V | 0.64 |
| G172A | 1.20 |
| G172C | 1.03 |
| K173N | 0.44 |
| K173R | 0.82 |
| L174A | 1.20 |
| L174G | 0.40 |
| L174K | 2.39 |
| L174M | 0.79 |
| L174N | 1.36 |
| L174Q | 0.99 |
| L174R | 1.50 |
| L174S | 0.85 |
| L174T | 1.12 |
| L174V | 0.62 |
| L174W | 0.78 |
| L174Y | 1.06 |
| L175E | 0.43 |
| Q051A | 0.34 |
| L175H | 0.57 |
| L175T | 1.43 |
| L175V | 0.94 |
| L175Y | 0.66 |
| R176K | 0.67 |
| N178G | 0.85 |
| N178K | 0.85 |
| N178M | 0.88 |
| K376L | 0.37 |
| F380T | 0.39 |
| N178R | 1.10 |
| H179A | 1.06 |
| H179C | 0.94 |
| H179E | 0.62 |
| H179G | 0.86 |
| H179I | 0.90 |
| H179K | 1.39 |
| H179L | 0.73 |
| H179M | 0.63 |
| H179N | 0.96 |
| H179P | 0.44 |
| H179R | 0.96 |
| H179S | 0.51 |
| H179T | 0.43 |
| H179V | 0.42 |
| L180F | 0.59 |
| L180G | 0.62 |
| L180K | 0.44 |
| L180M | 0.64 |
| W181M | 0.88 |
| L061F | 0.3 |
| W181Q | 0.88 |
| G182L | 0.90 |
| Y183L | 0.70 |
| F186Y | 0.59 |
| H192S | 0.49 |
| H192T | 0.50 |
| H193G | 0.68 |
| H193Q | 0.82 |
| H193S | 0.42 |
| H193Y | 0.58 |
| K195A | 0.51 |
| K195G | 0.45 |
| K195H | 0.45 |
| K195I | 0.50 |
| K195L | 0.45 |
| K195N | 0.74 |
| K195Q | 0.71 |
| K195R | 0.85 |
| K195S | 0.42 |
| K195T | 0.58 |
| K195W | 0.49 |
| K196E | 0.43 |
| D068G | 0.37 |
| K196G | 0.41 |
| K196L | 0.65 |
| K196R | 0.58 |
| K196S | 0.68 |
| K196T | 1.18 |
| K196W | 0.55 |
| P197A | 0.81 |
| P197D | 0.58 |
| P197E | 0.52 |
| P197F | 0.48 |
| P197G | 0.75 |
| P197H | 0.62 |
| P197K | 0.99 |
| P197L | 0.56 |
| P197M | 1.03 |
| P197Q | 0.69 |
| P197R | 0.58 |
| P197S | 0.70 |
| P197T | 0.41 |
| G198A | 0.80 |
| G198D | 1.99 |
| G198E | 0.49 |
| G198H | 0.84 |
| G198L | 0.48 |
| G198N | 0.80 |
| G198Q | 0.55 |
| G198R | 0.58 |
| G198S | 0.76 |
| G198T | 0.41 |
| G198Y | 0.81 |
| N200D | 0.46 |
| S202M | 0.40 |
| F204P | 0.63 |
| N205A | 1.30 |
| N205D | 0.85 |
| N205E | 1.94 |
| N205F | 0.52 |
| N205G | 0.79 |
| N205K | 0.76 |
| N205M | 0.58 |
| N205P | 0.75 |
| N205R | 0.54 |
| N205S | 0.80 |
| N205T | 0.85 |
| N205V | 0.49 |
| N205W | 0.41 |
| V206H | 0.50 |
| V206I | 0.94 |
| V206K | 1.75 |
| V206L | 1.57 |
| S395T | 0.39 |
| V206M | 0.43 |
| V206R | 1.30 |
| V206S | 0.72 |
| G072Y | 0.35 |
| V206T | 0.59 |
| I208A | 0.62 |
| I208C | 0.48 |
| I208K | 0.91 |
| I208L | 0.84 |
| I208M | 0.88 |
| I208Q | 0.77 |
| I208R | 1.14 |
| I208S | 0.62 |
| I208T | 1.01 |
| I208V | 1.07 |
| K209A | 0.53 |
| K209E | 0.46 |
| K209G | 0.44 |
| K209N | 0.50 |
| F398L | 0.35 |
| S404T | 0.37 |
| K209R | 0.68 |
| K209S | 0.50 |
| K209T | 0.50 |
| D212N | 1.52 |
| D212S | 0.93 |
| D212T | 0.76 |
| D213A | 0.85 |
| D213E | 0.79 |
| D213G | 0.81 |
| D213H | 0.75 |
| D213K | 0.82 |
| D213L | 0.56 |
| D213M | 1.56 |
| D213N | 1.53 |
| D213Q | 1.04 |
| D213R | 0.92 |
| D213V | 0.47 |
| D213W | 0.49 |
| D213Y | 0.49 |
| L214Q | 0.57 |
| S215A | 0.74 |
| S215D | 0.62 |
| S215E | 0.74 |
| S215G | 0.88 |
| S215H | 0.91 |
| S215K | 0.99 |
| S215L | 0.60 |
| S215M | 1.77 |
| S215Q | 0.79 |
| G077K | 0.32 |
| S215R | 0.71 |
| S215T | 0.80 |
| S215V | 0.69 |
| S215W | 0.52 |
| W216Y | 0.48 |
| L217M | 0.51 |
| W218F | 0.57 |
| N219A | 1.29 |
| N219C | 0.43 |
| N219D | 0.75 |
| N219E | 0.95 |
| N219H | 0.97 |
| N219I | 0.60 |
| N219K | 1.45 |
| N219L | 0.72 |
| N219M | 1.02 |
| I083H | 0.4 |
| N219R | 1.10 |
| N219S | 2.48 |
| N219T | 0.82 |
| N219W | 0.48 |
| E220A | 0.75 |
| E220H | 1.40 |
| E220I | 1.34 |
| E220L | 1.45 |
| E220S | 0.62 |
| E220T | 0.91 |
| E220V | 1.35 |
| S221A | 0.72 |
| S221C | 0.59 |
| S221M | 0.46 |
| S221Q | 1.37 |
| S221T | 0.94 |
| S221V | 1.04 |
| T222D | 0.43 |
| T222F | 0.43 |
| T222G | 0.49 |
| T222K | 0.75 |
| T222L | 0.64 |
| T222N | 0.80 |
| T222R | 0.75 |
| E220D | 0.39 |
| T222I | 0.4 |
| T222S | 0.63 |
| T222V | 0.79 |
| L224I | 0.61 |
| L230I | 0.87 |
| N231T | 1.10 |
| T232F | 0.73 |
| T232S | 0.76 |
| Q233A | 0.71 |
| Q233F | 0.53 |
| Q233G | 0.46 |
| Q233K | 1.69 |
| Q233L | 0.69 |
| Q233R | 1.50 |
| Q233Y | 0.50 |
| Q234M | 1.65 |
| S235A | 0.47 |
| S235E | 1.00 |
| S235G | 0.95 |
| S235H | 0.44 |
| S235K | 0.53 |
| S235T | 0.66 |
| P236A | 1.07 |
| P236G | 1.09 |
| P236H | 0.46 |
| P236K | 0.71 |
| P236R | 3.09 |
| Q234L | 0.40 |
| P236S | 0.91 |
| V237A | 0.90 |
| V237E | 1.93 |
| V237F | 0.41 |
| A412Q | 0.35 |
| A413Q | 0.38 |
| V414L | 0.36 |
| D418G | 0.45 |
| V237H | 0.75 |
| V237L | 1.12 |
| V237N | 0.67 |
| L089W | 0.26 |
| V237Q | 1.46 |
| V237R | 0.71 |
| V237S | 1.03 |
| V237T | 1.01 |
| V237W | 0.52 |
| A238D | 0.75 |
| A238E | 0.59 |
| A238H | 0.60 |
| A238K | 0.60 |
| A238Q | 1.02 |
| A238R | 0.49 |
| A238S | 2.62 |
| A238T | 0.44 |
| T240K | 1.13 |
| T240A | 0.48 |
| T240M | 0.48 |
| T240P | 0.56 |
| T240Q | 0.75 |
| T240R | 0.91 |
| A239N | 0.32 |
| T240S | 0.74 |
| T240V | 0.77 |
| Y242F | 1.08 |
| N245H | 0.50 |
| V247I | 2.01 |
| V247L | 0.83 |
| V247M | 0.52 |
| R248A | 0.43 |
| R248W | 0.52 |
| R248Y | 0.67 |
| I251Y | 0.37 |
| I251L | 0.58 |
| I251M | 0.43 |
| V253I | 0.76 |
| K255A | 0.40 |
| K255N | 0.52 |
| K255Q | 0.91 |
| K255R | 0.71 |
| K093P | 0.38 |
| K255S | 0.43 |
| I256A | 0.42 |
| I256H | 0.51 |
| I256L | 0.64 |
| I256V | 0.51 |
| P257A | 0.82 |
| P257G | 0.51 |
| P257I | 1.07 |
| P257K | 0.92 |
| P257L | 0.69 |
| P257M | 0.90 |
| P257N | 0.69 |
| P257Q | 0.61 |
| S261R | 1.19 |
| S261T | 0.66 |
| S261V | 0.48 |
| S261W | 0.44 |
| L263A | 0.76 |
| L263K | 2.73 |
| L263M | 0.89 |
| L263R | 1.63 |
| L263T | 0.49 |
| N104I | 0.35 |
| L263V | 0.75 |
| P264A | 0.43 |
| P264H | 0.60 |
| V265I | 0.58 |
| F266Y | 0.58 |
| A267M | 0.45 |
| A267T | 1.34 |
| T269A | 1.63 |
| T269C | 0.75 |
| T269D | 0.76 |
| T269S | 1.01 |
| R270M | 0.46 |
| R270N | 0.52 |
| R270S | 0.69 |
| I271F | 0.72 |
| I271G | 1.29 |
| L105C | 0.33 |
| I271L | 10.62 |
| V272E | 0.39 |
| I271M | 3.24 |
| I271S | 0.42 |
| I271V | 1.05 |
| V272D | 1.36 |
| V272R | 0.74 |
| V272S | 0.96 |
| V272T | 1.61 |
| F273H | 1.41 |
| F273T | 0.48 |
| F273Y | 0.90 |
| T274A | 0.51 |
| T274F | 1.28 |
| T274S | 0.62 |
| Q276C | 0.88 |
| Q276D | 1.69 |
| Q276E | 1.05 |
| Q276H | 1.20 |
| Q276I | 0.51 |
| Q276L | 0.48 |
| W119Q | 0.72 |
| Q276M | 1.14 |
| Q276R | 1.30 |
| Q276S | 1.63 |
| Q276Y | 1.94 |
| V277A | 0.65 |
| V277C | 0.41 |
| V277D | 0.79 |
| V277E | 1.02 |
| V277G | 1.18 |
| V277H | 1.09 |
| V277K | 1.51 |
| V277M | 0.94 |
| V277N | 1.15 |
| V277Q | 0.82 |
| V277R | 1.63 |
| V277S | 0.83 |
| K124H | 0.35 |
| V277T | 1.94 |
| V277Y | 0.66 |
| L278A | 1.13 |
| L278E | 1.03 |
| L278F | 1.26 |
| L278G | 1.33 |
| L278H | 4.50 |
| L278I | 0.93 |
| L278K | 1.75 |
| D275V | 0.4 |
| L278N | 1.74 |
| L278R | 5.87 |
| L278S | 1.67 |
| L278T | 1.66 |
| L278V | 0.44 |
| L278Y | 1.51 |
| K279H | 0.44 |
| K279Q | 0.84 |
| K279R | 1.10 |
| K279T | 0.86 |
| F280G | 0.47 |
| F280Q | 0.43 |
| S282D | 0.41 |
| S282G | 0.54 |
| S282M | 2.64 |
| S282Q | 0.41 |
| Q283E | 0.63 |
| Q283P | 1.18 |
| Q283R | 0.59 |
| Q283S | 1.73 |
| Q283T | 0.65 |
| D284A | 0.58 |
| D284E | 1.21 |
| D284G | 0.60 |
| D284H | 0.51 |
| D284L | 0.50 |
| D284M | 0.56 |
| D284N | 0.40 |
| D284Q | 0.95 |
| D284S | 0.99 |
| E285F | 0.47 |
| E285G | 0.52 |
| E285H | 1.30 |
| E285M | 0.43 |
| E285N | 0.40 |
| E285Q | 0.59 |
| E285Y | 0.99 |
| L286S | 0.46 |
| D284T | 0.39 |
| L286R | 0.53 |
| V287I | 0.51 |
| V287T | 0.50 |
| Y288L | 0.79 |
| Y288W | 0.49 |
| T289K | 0.75 |
| T289S | 0.48 |
| F290I | 0.41 |
| F290M | 1.03 |
| G291Q | 0.80 |
| G291R | 0.45 |
| G291S | 0.41 |
| G291V | 1.63 |
| E292A | 0.66 |
| E292C | 0.71 |
| E292F | 0.90 |
| E292G | 0.41 |
| E292H | 1.26 |
| E442W | 0.38 |
| E292K | 1.27 |
| E292N | 0.99 |
| E292P | 1.05 |
| E292R | 0.42 |
| E292V | 1.28 |
| E292W | 0.83 |
| T293A | 1.90 |
| T293C | 1.67 |
| T293D | 1.46 |
| V137C | 0.37 |
| V137S | 0.36 |
| V137L | 0.21 |
| Q143C | 0.28 |
| L144R | 0.26 |
| K152W | 0.37 |
| A153S | 0.34 |
| K154I | 0.38 |
| E156C | 0.35 |
| E158G | 0.37 |
| K159G | 0.38 |
| A160W | 0.39 |
| G161V | 0.42 |
| D163W | 0.38 |
| D163F | 0.39 |
| L165C | 0.27 |
| V166N | 0.47 |
| E167F | 0.31 |
| K170A | 0.40 |
| K170Q | 0.40 |
| K173Q | 0.32 |
| L174H | 0.38 |
| R176L | 0.40 |
| P177V | 0.36 |
| L180I | 0.38 |
| W181K | 0.29 |
| Y183E | 0.32 |
| Y184W | 0.39 |
| H193R | 0.33 |
| H193F | 0.38 |
| K195V | 0.36 |
| K196N | 0.39 |
| K196Y | 0.39 |
| P197W | 0.39 |
| G198W | 0.29 |
| N200T | 0.37 |
| F204W | 0.39 |
| N205L | 0.39 |
| N205Y | 0.4 |
| V206Q | 0.33 |
| K209F | 0.4 |
| K209L | 0.38 |
| N211L | 0.41 |
| N211W | 0.51 |
| W218M | 0.38 |
| W218V | 0.28 |
| T293F | 1.94 |
| T293G | 1.00 |
| T293K | 1.35 |
| T293L | 1.00 |
| T293M | 2.29 |
| T293P | 1.64 |
| T293Q | 1.83 |
| T293S | 0.89 |
| T293V | 2.15 |
| T293Y | 1.49 |
| V294M | 0.41 |
| A298G | 0.43 |
| A298I | 0.41 |
| G300R | 0.42 |
| I301A | 0.88 |
| I301V | 0.88 |
| V287N | 0.35 |
| V302W | 0.46 |
| V302I | 0.45 |
| I303V | 0.47 |
| W304G | 1.13 |
| W304I | 1.17 |
| G305D | 1.00 |
| G305E | 1.62 |
| T306D | 0.76 |
| T306E | 0.52 |
| T306S | 1.02 |
| L307K | 0.43 |
| L307N | 0.76 |
| L307Q | 0.61 |
| L307S | 0.86 |
| L307T | 1.08 |
| L307V | 0.48 |
| L307W | 0.64 |
| L307Y | 0.60 |
| S308D | 0.92 |
| S308G | 1.73 |
| S308H | 1.15 |
| S308K | 1.33 |
| S308N | 2.33 |
| S308P | 0.65 |
| S308R | 1.34 |
| S308T | 0.72 |
| I309D | 0.72 |
| I309E | 1.99 |
| I309G | 1.44 |
| I303D | 0.34 |
| I309H | 1.30 |
| I309K | 0.98 |
| I309L | 1.72 |
| I309M | 1.47 |
| I309N | 3.11 |
| I309Q | 1.64 |
| I309R | 2.27 |
| I309S | 1.16 |
| I309T | 2.09 |
| I309V | 0.60 |
| I309W | 0.88 |
| M310A | 1.50 |
| M310G | 2.73 |
| M310Q | 0.59 |
| M310R | 0.50 |
| M310S | 1.61 |
| M310V | 0.70 |
| R311G | 0.53 |
| L307G | 0.32 |
| R311G | 0.54 |
| R311H | 0.48 |
| R311K | 0.72 |
| R311Q | 0.43 |
| R311S | 0.84 |
| R311T | 0.52 |
| S312G | 0.49 |
| S312N | 1.26 |
| S312T | 0.75 |
| M313A | 1.34 |
| M313E | 0.63 |
| M313G | 0.56 |
| M313H | 1.23 |
| M313K | 2.85 |
| S312L | 0.38 |
| M313L | 1.05 |
| M313P | 1.11 |
| M313R | 2.30 |
| M313S | 0.88 |
| M313T | 0.67 |
| M313V | 0.99 |
| M313Y | 1.12 |
| K314A | 0.82 |
| K314D | 0.53 |
| K314H | 1.10 |
| K314I | 0.54 |
| K314N | 0.57 |
| K314Q | 0.62 |
| K314R | 0.95 |
| K314S | 0.61 |
| K314T | 0.61 |
| K314Y | 0.45 |
| S315A | 0.85 |
| S315E | 0.41 |
| S315G | 0.72 |
| S315H | 2.04 |
| S315K | 0.62 |
| S315L | 0.42 |
| S315M | 0.63 |
| S315R | 1.04 |
| S315T | 0.97 |
| S315Y | 0.50 |
| C316D | 0.41 |
| L317A | 1.27 |
| L317D | 0.61 |
| L317H | 1.05 |
| L317I | 1.76 |
| L317K | 5.11 |
| L317M | 1.20 |
| L317N | 0.73 |
| L317Q | 1.67 |
| L317R | 2.41 |
| L317S | 1.03 |
| L317T | 0.93 |
| L317W | 0.84 |
| L318D | 0.46 |
| L318F | 0.51 |
| L318G | 0.49 |
| L318H | 0.45 |
| L318I | 0.70 |
| L318K | 1.36 |
| L318M | 1.68 |
| L318N | 0.52 |
| L318Q | 0.71 |
| L318R | 1.34 |
| L318S | 0.71 |
| L318T | 0.63 |
| D320E | 0.78 |
| D320G | 0.83 |
| D320H | 1.75 |
| D320I | 1.00 |
| D320K | 6.42 |
| D320M | 0.79 |
| D320N | 0.52 |
| D320R | 3.19 |
| D320S | 1.19 |
| D320W | 0.40 |
| D320V | 0.35 |
| D320Y | 0.86 |
| N321A | 1.01 |
| N321D | 1.25 |
| N321H | 0.92 |
| N321K | 1.29 |
| N321R | 1.23 |
| N321S | 1.26 |
| N321T | 0.64 |
| N321Y | 0.40 |
| M323F | 0.64 |
| M323I | 0.55 |
| M323L | 0.55 |
| E324A | 0.59 |
| E324D | 1.15 |
| E324H | 0.79 |
| E324M | 0.50 |
| E324N | 1.01 |
| E324R | 2.28 |
| E324S | 0.62 |
| T325A | 1.87 |
| T325D | 1.78 |
| T325E | 4.03 |
| T325G | 4.21 |
| T325H | 3.45 |
| T325K | 4.37 |
| T325M | 2.11 |
| T325N | 4.64 |
| T325Q | 5.08 |
| T325S | 3.19 |
| T325V | 1.24 |
| T325W | 0.62 |
| I326K | 0.95 |
| I326L | 1.50 |
| I326V | 6.29 |
| I326Y | 0.77 |
| L327M | 0.52 |
| N328A | 0.67 |
| N328C | 1.25 |
| N328G | 0.56 |
| N328H | 0.88 |
| N328I | 1.85 |
| N328K | 2.12 |
| N328L | 2.01 |
| N328Q | 1.13 |
| N328R | 0.68 |
| N328S | 2.22 |
| N328T | 0.59 |
| N328V | 1.16 |
| N328Y | 1.66 |
| I331V | 0.94 |
| N328W | 0.33 |
| V334T | 0.39 |
| V334P | 0.46 |
| T335S | 0.47 |
| A338Q | 0.63 |
| K339M | 0.61 |
| S342A | 0.68 |
| Q343T | 0.49 |
| Q343V | 0.51 |
| Q347A | 0.78 |
| Q347E | 0.78 |
| Q347G | 2.68 |
| Q347M | 0.61 |
| Q347R | 0.55 |
| Q347S | 2.38 |
| E348D | 0.67 |
| E348G | 0.55 |
| E348S | 0.44 |
| Q349A | 0.47 |
| Q349E | 0.83 |
| Q349K | 0.93 |
| Q349M | 0.70 |
| Q349N | 0.44 |
| M035V | 0.37 |
| Q349R | 0.73 |
| Q349T | 0.49 |
| V351A | 1.14 |
| V351S | 0.92 |
| I353T | 0.42 |
| I353V | 1.61 |
| N356A | 0.41 |
| N356D | 0.79 |
| N356H | 0.82 |
| N356S | 0.46 |
| W357A | 0.80 |
| W357C | 0.67 |
| L037W | 0.36 |
| W357S | 0.41 |
| W357T | 0.62 |
| N358C | 0.66 |
| N358G | 0.41 |
| N358T | 0.58 |
| V351I | 0.36 |
| N358L | 0.38 |
| S359D | 0.45 |
| S359E | 1.05 |
| S359H | 0.44 |
| S359K | 0.66 |
| S359M | 0.63 |
| S359T | 2.11 |
| S359V | 0.65 |
| S360T | 0.50 |
| P367A | 0.55 |
| P367C | 0.83 |
| P367G | 0.47 |
| P367K | 0.57 |
| P367R | 0.46 |
| P367S | 0.52 |
| D368A | 1.34 |
| D368E | 1.28 |
| D368G | 0.49 |
| D368H | 0.96 |
| D368K | 1.31 |
| D368L | 0.64 |
| D368M | 0.78 |
| D368R | 1.31 |
| D368S | 0.93 |
| D368T | 0.80 |
| D361H | 0.37 |
| D368V | 0.41 |
| N369H | 1.33 |
| N369R | 0.55 |
| N369S | 0.54 |
| A371E | 1.05 |
| A371F | 0.52 |
| A371H | 1.20 |
| A371I | 0.50 |
| A371K | 1.76 |
| L374W | 0.34 |
| A371L | 0.57 |
| A371M | 0.57 |
| A371R | 1.51 |
| A371S | 1.45 |
| A371V | 0.94 |
| Q373A | 0.65 |
| Q373E | 0.81 |
| Q373F | 0.62 |
| Q373K | 0.73 |
| Q373L | 0.84 |
| Q373M | 1.43 |
| Q373R | 0.68 |
| Q373S | 0.87 |
| Q373V | 1.05 |
| L374A | 0.60 |
| L374H | 1.42 |
| L374I | 0.80 |
| L374M | 1.11 |
| L374N | 0.43 |
| L374P | 0.43 |
| L374R | 0.83 |
| L374S | 0.58 |
| L374T | 0.47 |
| L374V | 0.56 |
| L374Y | 0.66 |
| E375A | 0.42 |
| E375G | 0.90 |
| E375K | 1.49 |
| E375L | 0.46 |
| E375M | 0.54 |
| E375N | 0.81 |
| E375R | 0.43 |
| E375S | 0.77 |
| E375T | 1.17 |
| K376A | 0.95 |
| K376D | 0.78 |
| K376E | 0.88 |
| K376M | 0.46 |
| K376Q | 0.69 |
| K376R | 0.67 |
| K376S | 0.80 |
| K376T | 0.53 |
| K376V | 0.58 |
| K376Y | 0.42 |
| G377D | 1.35 |
| G377E | 0.59 |
| G377H | 1.49 |
| G377K | 1.50 |
| G377P | 2.30 |
| G377R | 1.28 |
| G377S | 1.80 |
| Q051R | 0.36 |
| G377T | 3.83 |
| G378K | 1.22 |
| G378N | 0.64 |
| G378R | 1.03 |
| K379G | 0.52 |
| K379H | 0.57 |
| K379R | 0.74 |
| K379S | 0.46 |
| K379T | 0.4 |
| M035Q | 0.37 |
| F380I | 0.56 |
| F380L | 0.67 |
| F380P | 0.47 |
| F380W | 2.15 |
| F380Y | 1.50 |
| T381H | 0.48 |
| T381K | 1.06 |
| T381N | 0.51 |
| T381Q | 0.84 |
| T381R | 0.87 |
| T381S | 0.87 |
| T381V | 0.89 |
| R383A | 0.51 |
| R383E | 0.51 |
| R383H | 0.71 |
| R383I | 0.71 |
| R383K | 1.30 |
| R383L | 1.31 |
| R383M | 0.61 |
| R383N | 0.77 |
| T381E | 0.35 |
| R383S | 0.87 |
| R383T | 0.98 |
| R383V | 1.05 |
| K385A | 1.12 |
| K385G | 0.62 |
| K385H | 0.50 |
| K385N | 0.41 |
| K385Q | 0.73 |
| K385R | 0.94 |
| K385S | 1.05 |
| K385T | 0.46 |
| K385V | 0.43 |
| T387S | 0.93 |
| L388F | 0.92 |
| L388H | 0.47 |
| L388I | 0.98 |
| L388M | 0.79 |
| L388R | 0.60 |
| L388T | 0.51 |
| L388V | 0.78 |
| L388W | 0.77 |
| L388Y | 1.18 |
| E392W | 0.31 |
| E389A | 1.14 |
| E389G | 0.91 |
| E389H | 1.17 |
| E389K | 1.91 |
| E389L | 0.65 |
| E389M | 0.60 |
| E389P | 0.75 |
| E389Q | 0.69 |
| E389R | 0.94 |
| E389S | 1.08 |
| E389T | 0.70 |
| E389Y | 0.77 |
| L391C | 0.90 |
| E392A | 0.58 |
| E392F | 0.54 |
| E392G | 1.00 |
| E392K | 0.66 |
| E392L | 0.80 |
| E392M | 1.54 |
| E392Q | 1.01 |
| E392R | 0.66 |
| E392S | 0.52 |
| E392T | 0.72 |
| E392V | 1.27 |
| E392Y | 0.92 |
| Q393A | 1.26 |
| Q393D | 0.45 |
| Q393F | 1.23 |
| Q393H | 1.05 |
| Q393K | 0.80 |
| Q393L | 0.91 |
| Q393M | 0.80 |
| Q393N | 0.72 |
| Q393R | 0.74 |
| Q393S | 1.15 |
| Q393T | 0.41 |
| F394L | 0.56 |
| F394W | 0.41 |
| S395A | 1.10 |
| S395G | 0.77 |
| S395H | 0.56 |
| S395K | 0.96 |
| S395R | 1.98 |
| E396A | 0.52 |
| E396D | 0.64 |
| E396H | 0.47 |
| E396Q | 0.73 |
| E396R | 0.61 |
| E396S | 0.61 |
| E396T | 0.89 |
| E396L | 0.39 |
| Y399A | 1.01 |
| Y399C | 0.46 |
| Y399E | 1.49 |
| S407L | 0.4 |
| Y399K | 1.94 |
| Y399M | 2.70 |
| Y399N | 0.52 |
| Y399Q | 1.18 |
| Y399R | 1.20 |
| Y399S | 1.01 |
| Y399T | 2.40 |
| Y399V | 1.44 |
| Y399W | 1.92 |
| S401A | 0.82 |
| S401E | 0.46 |
| S401N | 0.42 |
| Y403F | 0.62 |
| S404A | 0.63 |
| S404P | 0.64 |
| S401G | 0.38 |
| T405F | 0.36 |
| T405A | 0.56 |
| T405G | 2.32 |
| T405K | 0.74 |
| T405M | 0.48 |
| T405P | 0.64 |
| T405Q | 0.75 |
| T405R | 0.60 |
| T405S | 0.94 |
| T405W | 0.73 |
| T405Y | 0.44 |
| L406A | 0.70 |
| L406C | 0.98 |
| L406E | 0.73 |
| L406F | 1.42 |
| L406G | 1.00 |
| L406I | 0.61 |
| L406N | 0.76 |
| L406Q | 0.93 |
| L406S | 0.47 |
| L406T | 0.83 |
| L406V | 0.87 |
| L406Y | 0.74 |
| S407A | 1.16 |
| S407D | 1.52 |
| S407E | 1.38 |
| S407F | 1.42 |
| S407G | 0.75 |
| S407H | 1.34 |
| S407M | 0.74 |
| K411H | 0.33 |
| S407N | 0.72 |
| S407P | 0.94 |
| S407Q | 1.71 |
| S407R | 1.04 |
| S407V | 0.56 |
| S407W | 0.41 |
| K409A | 2.18 |
| K409D | 0.65 |
| K409E | 0.62 |
| K409G | 0.50 |
| K409H | 0.64 |
| K409I | 0.51 |
| K409P | 0.48 |
| K409Q | 3.33 |
| K409R | 0.84 |
| K409S | 0.72 |
| I083K | 0.30 |
| K409T | 0.63 |
| K409V | 0.48 |
| A412Y | 0.66 |
| E410D | 0.47 |
| E410K | 0.70 |
| E410M | 0.42 |
| E410N | 0.67 |
| E410P | 0.73 |
| E410Q | 0.85 |
| E410R | 0.61 |
| E410S | 0.81 |
| E410T | 1.54 |
| E410V | 0.65 |
| E410Y | 0.62 |
| K411A | 0.48 |
| K411N | 1.02 |
| K411P | 0.42 |
| K411R | 0.97 |
| K411S | 1.21 |
| K411T | 0.63 |
| K411V | 0.99 |
| A412D | 0.74 |
| A412G | 0.80 |
| A412I | 0.81 |
| E220M | 0.36 |
| P226W | 0.51 |
| A412L | 0.65 |
| A412N | 0.86 |
| A412P | 0.77 |
| A412R | 0.66 |
| A412S | 0.86 |
| A412V | 0.53 |
| A412W | 0.54 |
| D413E | 0.52 |
| D413K | 0.42 |
| D413N | 0.94 |
| D413R | 0.50 |
| D413T | 0.41 |
| V414I | 1.12 |
| V414M | 0.53 |
| K415G | 0.40 |
| K415S | 0.42 |
| K415W | 0.42 |
| D416F | 0.41 |
| D416G | 0.67 |
| D416H | 0.57 |
| D416I | 0.63 |
| D416K | 0.76 |
| D416L | 0.75 |
| D416N | 0.73 |
| D416Q | 0.83 |
| D416R | 0.46 |
| V237C | 0.35 |
| D416T | 0.85 |
| D416V | 0.59 |
| D416Y | 0.40 |
| T417I | 1.22 |
| D413A | 0.38 |
| D413S | 0.39 |
| K415Y | 0.39 |
| D418A | 0.92 |
| D418E | 1.31 |
| D418F | 0.81 |
| L089P | 0.38 |
| D418G | 0.45 |
| D418I | 0.99 |
| D418L | 1.28 |
| D418M | 1.09 |
| D418N | 0.91 |
| D418P | 2.11 |
| D418Q | 1.05 |
| D418R | 1.18 |
| D418S | 0.78 |
| D418V | 1.43 |
| D418Y | 0.97 |
| A419E | 0.45 |
| A419F | 2.17 |
| A419G | 0.42 |
| A419H | 1.21 |
| A419I | 1.64 |
| A419K | 1.88 |
| A419L | 0.56 |
| A419N | 0.53 |
| V421I | 0.39 |
| A419R | 1.81 |
| A419S | 2.65 |
| A419W | 0.69 |
| A419Y | 1.44 |
| V420I | 1.04 |
| V420P | 0.48 |
| D421A | 1.28 |
| D421E | 0.81 |
| D421G | 0.62 |
| D421H | 1.98 |
| K255G | 0.39 |
| D421K | 2.42 |
| D421L | 0.73 |
| D421M | 0.94 |
| D421N | 1.89 |
| D421Q | 1.54 |
| D421R | 2.21 |
| D421S | 2.12 |
| K094C | 0.33 |
| D421T | 0.80 |
| D421Y | 0.66 |
| V422I | 0.42 |
| V422T | 0.49 |
| A425G | 1.20 |
| A425I | 0.44 |
| A425K | 1.75 |
| A425M | 0.70 |
| A425N | 0.46 |
| A425R | 0.49 |
| A425S | 0.47 |
| D426E | 0.62 |
| D426G | 0.85 |
| F433L | 1.87 |
| F433P | 0.95 |
| F433R | 1.63 |
| F433S | 0.86 |
| F433T | 1.86 |
| F433V | 1.63 |
| F433W | 1.28 |
| L434F | 0.41 |
| L434G | 0.47 |
| L263H | 0.36 |
| L434I | 0.89 |
| L434M | 0.60 |
| L434V | 0.46 |
| K435A | 1.08 |
| K435C | 0.53 |
| K435E | 0.78 |
| K435G | 0.64 |
| K435H | 1.05 |
| K435R | 1.01 |
| K435S | 1.03 |
| K435T | 0.73 |
| K435V | 0.44 |
| K435Y | 0.50 |
| P436D | 1.19 |
| P436E | 0.74 |
| P436G | 1.19 |
| L105H | 0.36 |
| P436H | 0.72 |
| V272M | 0.31 |
| P436I | 0.84 |
| P436K | 2.05 |
| P436L | 0.63 |
| P436M | 0.61 |
| P436Q | 0.86 |
| P436R | 1.00 |
| P436S | 0.92 |
| P436T | 0.59 |
| P436W | 0.43 |
| P436Y | 0.49 |
| P437A | 0.56 |
| P437D | 0.62 |
| P437G | 0.50 |
| P437H | 1.11 |
| P437I | 2.46 |
| P437K | 0.83 |
| P437L | 0.51 |
| P437M | 2.55 |
| P437Q | 0.96 |
| D275L | 0.24 |
| P437R | 0.85 |
| P437S | 0.57 |
| P437Y | 0.42 |
| M438A | 0.75 |
| M438C | 0.63 |
| M438D | 0.87 |
| M438E | 0.72 |
| M438G | 0.83 |
| M438L | 0.86 |
| M438N | 1.08 |
| M438P | 0.81 |
| M438Q | 0.85 |
| M438R | 0.99 |
| M438S | 0.83 |
| M438T | 3.99 |
| M438V | 0.85 |
| P125A | 0.36 |
| M438W | 0.57 |
| E439A | 1.20 |
| E439C | 0.58 |
| E439F | 1.00 |
| E439G | 1.22 |
| E439H | 0.74 |
| E439K | 1.20 |
| E439L | 0.88 |
| E439P | 1.16 |
| Q276G | 0.36 |
| E439Q | 1.32 |
| E439S | 1.02 |
| E439T | 1.15 |
| E439V | 1.57 |
| E439W | 0.62 |
| T440A | 1.22 |
| T440D | 1.03 |
| T440E | 1.00 |
| T440F | 0.85 |
| T440G | 0.86 |
| T440H | 3.00 |
| T440I | 1.04 |
| T440L | 0.97 |
| T440M | 1.08 |
| T440P | 0.88 |
| T440R | 1.77 |
| T440S | 1.17 |
| T440V | 1.02 |
| T440Y | 1.11 |
| E441A | 1.47 |
| E441D | 0.67 |
| E441F | 3.91 |
| E441G | 0.87 |
| E441H | 0.65 |
| E441K | 0.80 |
| E441L | 0.82 |
| E441N | 0.82 |
| E441Q | 0.81 |
| E441S | 0.79 |
| E441T | 0.66 |
| E441V | 0.54 |
| E441Y | 0.51 |
| E442C | 1.38 |
| E442G | 0.51 |
| E442H | 0.76 |
| E442K | 0.73 |
| E442P | 0.91 |
| E442Q | 0.74 |
| D284Y | 0.37 |
| L286W | 0.38 |
| E442R | 3.94 |
| E442T | 0.61 |
| E442V | 0.65 |
| E442Y | 0.60 |
| P443A | 1.63 |
| P443E | 1.07 |
| P443F | 0.70 |
| P443G | 1.12 |
| P443H | 1.08 |
| P443L | 1.19 |
| P443M | 1.99 |
| P443N | 1.25 |
| P443Q | 0.96 |
| P443R | 1.04 |
| P443S | 0.99 |
| P443T | 0.87 |
| P443W | 0.64 |
| Q444M | 0.37 |
| Q444D | 0.97 |
| Q444E | 1.19 |
| Q444F | 0.66 |
| Q444G | 0.93 |
| Q444H | 0.97 |
| Q444I | 0.58 |
| Q444K | 1.03 |
| Q444N | 1.01 |
| Q444R | 0.85 |
| Q444V | 1.12 |
| Q444W | 0.64 |
| Q444Y | 0.67 |
| I445A | 0.97 |
| I445G | 0.98 |
| I445H | 1.35 |
| I445L | 1.06 |
| I445M | 1.57 |
| I445N | 1.24 |
| I445P | 1.67 |
| I445Q | 1.26 |
| I445R | 1.08 |
| I445S | 1.21 |
| I445T | 1.38 |
| I445V | 1.25 |
| I445W | 0.69 |
| I445Y | 0.53 |
| F446A | 1.58 |
| F446C | 0.75 |
| F446D | 1.18 |
| F446E | 1.10 |
| F446G | 1.12 |
| F446H | 1.28 |
| F446I | 1.06 |
| F446K | 0.94 |
| F446L | 0.93 |
| F446M | 1.31 |
| F446Q | 0.72 |
| F446R | 0.89 |
| F446T | 0.89 |
| F446V | 0.91 |
| F446W | 1.40 |
| Y447D | 3.25 |
| Y447E | 1.36 |
| Y447F | 1.41 |
| Y447G | 0.92 |
| Y447I | 1.36 |
| Y447L | 1.09 |
| Y447M | 0.90 |
| Y447N | 1.58 |
| Y447P | 1.46 |
| Y447Q | 2.37 |
| Y447R | 1.12 |
| Y447T | 1.90 |
| Y447V | 1.38 |
| Y447W | 1.07 |

[0739] 2. Inactive Mutants

[0740] The other mutants that exhibited less than 20% hyaluronidase activity of wildtype PH20, in at least one of the duplicates, were rescreened to confirm that the dead mutants were inactive. To confirm the inactive mutants, the hyaluronidase activity assay described in Example 3 was modified to incorporate an overnight 37° C. substrate-sample incubation step prior to measurement of enzymatic activity. The modified assay was intended to detect PH20 activities below 0.2 U/mL.

[0741] The preparation of the bHA coated plates and blocking of the plates prior to addition of the transfected variant supernatants or wildtype PH20 was the same as described in Example 3. The assay was modified as follows. First, transfected variant supernatants or wildypte PH20 not containing a mutation generated as described in Example 2 were diluted in duplicate 1:25 in assay diluent. For the standard curve, 1:3 serial dilutions of rHuPH20 (generated as described in Example 1) were made in assay diluent in duplicate starting from 0.1 U/mL down to 0.00014 U/mL. A blank well also was included. Then, 100 μl of the diluted samples or standard were added to pre-designated wells of the bHA-coated and blocked plate and allowed to incubate at 37° C. overnight. After the incubation, the plates were washed and binding to bHA detected as described above in Example 3. Optical density was measured at 450 nm within 30 minutes of adding the stop solution.

[0742] The identified reconfirmed inactive mutants are set forth in Table 8. The Table sets forth the amino acid replacement compared to the sequence of amino acids of PH20 set forth in SEQ ID NO:3.

TABLE 8
Inactive Mutants

| | | | | | | | |
|---|---|---|---|---|---|---|---|
| N002H | R060V | R121W | C189P | P236I | V287N | L336W | G377V |
| N002K | R060Y | R121Y | C189R | P236L | V287P | L336Y | G378D |
| N002W | L061A | N122A | C189S | P236N | V287Q | A337C | G378E |
| N002Y | L061E | N122C | C189T | P236Q | V287R | A337F | G378F |
| F003A | L061F | N122E | C189V | P236T | V287S | A337G | G378I |
| F003G | L061G | N122F | C189W | P236Y | Y288D | A337I | G378L |
| F003K | L061H | N122I | C189Y | A238F | Y288E | A337K | G378M |
| F003P | L061N | N122K | Y190C | A238G | Y288F | A337L | G378Q |
| F003T | L061P | N122Q | Y190E | A238L | Y288G | A337M | G378T |
| F003V | L061Q | N122R | Y190F | A238P | Y288H | A337R | G378W |
| R004D | L061R | N122S | Y190G | A238V | Y288I | A337T | G378Y |
| R004E | L061T | N122T | Y190H | A238W | Y288K | A337W | K379A |
| R004F | L061W | N122V | Y190K | A238Y | Y288P | A338C | K379C |
| R004G | L061Y | W123A | Y190L | A239C | Y288R | A338D | K379E |
| R004L | G062A | W123C | Y190N | A239F | Y288T | A338E | K379F |
| R004P | G062C | W123D | Y190Q | A239G | T289A | A338F | K379I |
| R004W | G062D | W123E | Y190R | A239H | T289C | A338G | K379L |
| R004Y | G062F | W123H | Y190S | A239I | T289E | A338H | K379M |
| A005D | G062I | W123L | Y190T | A239L | T289G | A338I | K379W |
| A005G | G062K | W123M | Y190V | A239P | T289H | A338K | F380C |
| A005I | G062L | W123P | Y190W | A239R | T289L | A338L | F380D |
| A005L | G062M | W123Q | N191A | A239S | T289P | A338P | F380E |
| A005M | G062P | W123R | N191E | A239T | T289Q | A338R | F380G |
| A005N | G062Q | W123S | N191F | A239V | T289R | A338T | F380Q |
| A005P | G062R | W123T | N191G | A239W | T289S | A338V | F380R |
| A005Q | G062S | W123V | N191K | A239Y | T289Y | K339D | F380S |
| A005R | G062T | W123Y | N191L | T240E | F290D | K339E | T381G |
| A005T | G062V | K124C | N191M | T240F | F290Q | K339F | T381L |
| A005V | G062Y | K124D | N191P | T240G | F290Y | K339G | T381P |
| A005W | Y063C | K124E | N191Q | T240N | G291A | K339H | T381W |
| A005Y | Y063G | K124F | N191R | T240W | G291C | K339L | T381Y |
| P006E | Y063P | K124N | N191S | T240Y | G291D | K339N | V382E |
| P006F | Y064A | P125C | N191T | L241A | G291E | K339P | V382G |
| P006T | Y064C | P125D | N191V | L241C | G291F | K339S | V382H |
| P006V | Y064D | P125G | N191W | L241D | G291M | K339T | V382K |
| P006Y | Y064E | P125L | N191Y | L241E | G291N | K339V | V382L |
| P007C | Y064F | P125N | H192C | L241G | G291T | K339W | V382M |
| P007D | Y064G | P125W | H192F | L241I | G291W | K339Y | V382N |
| P007F | Y064H | K126F | H192G | L241P | G291Y | M340A | V382P |
| P007G | Y064I | K126H | H192K | L241R | E292I | M340C | V382Q |
| P007H | Y064K | K126I | H192L | L241S | E292L | M340D | V382R |
| P007I | Y064L | K126L | H192M | L241T | E292T | M340E | V382S |
| P007K | Y064P | K126N | H192N | L241V | T293E | M340F | V382T |
| P007L | Y064Q | K126P | H192P | L241W | T293N | M340G | V382W |
| P007Q | Y064R | K126Y | H192Q | Y242A | V294A | M340H | V382Y |
| P007R | Y064S | D127K | H192R | Y242C | V294E | M340K | R383G |
| P007S | Y064T | V128E | H192V | Y242D | V294G | M340P | R383P |
| P007T | Y064V | V128P | H192W | Y242G | V294H | M340R | G384C |
| P007W | Y064W | Y129A | H192Y | Y242I | V294K | M340S | G384F |
| P007Y | P065A | Y129C | H193A | Y242L | V294L | M340T | G384M |
| V008D | P065C | Y129D | H193D | Y242M | V294N | M340V | G384Q |
| V008E | P065D | Y129E | H193K | Y242P | V294P | M340W | G384S |
| V008G | P065G | Y129G | H193L | Y242R | V294Q | C341A | G384T |
| V008H | P065H | Y129H | H193M | Y242S | V294R | C341E | K385C |
| V008N | P065I | Y129L | H193P | Y242T | V294S | C341G | K385L |
| V008R | P065K | Y129P | H193V | Y242V | V294T | C341H | K385M |
| V008S | P065N | Y129Q | Y194A | Y242W | V294W | C341K | K385P |
| V008W | P065R | Y129S | Y194C | V243C | A295C | C341L | K385W |
| I009C | P065S | Y129T | Y194I | V243D | A295G | C341M | K385Y |
| I009D | P065T | Y129V | Y194L | V243F | A295H | C341N | P386A |
| I009E | P065V | Y129W | Y194P | V243G | A295I | C341Q | P386C |
| I009G | P065W | K130C | Y194S | V243H | A295L | C341R | P386F |
| I009N | P065Y | K130D | Y194T | V243L | A295N | C341S | P386G |
| I009P | Y066A | K130G | Y194V | V243M | A295P | C341T | P386H |
| P010F | Y066C | K130H | K195S | V243P | A295T | C341V | P386I |
| P010I | Y066D | K130L | P197C | V243Q | A295V | C341Y | P386L |
| P010L | Y066E | K130N | G198V | V243R | A295Y | S342D | P386M |
| P010M | Y066G | K130S | G198W | V243S | L296C | S342E | P386N |
| P010Y | Y066I | K130T | Y199E | V243W | L296F | S342F | P386Q |
| N011A | Y066K | K130W | Y199G | V243Y | L296G | S342H | P386R |
| N011C | Y066L | K130Y | Y199H | R244A | L296I | S342K | P386S |
| N011F | Y066N | N131P | Y199I | R244D | L296K | S342L | P386T |
| N011I | Y066P | R132P | Y199K | R244G | L296M | S342M | P386V |
| N011L | Y066S | S133D | Y199L | R244I | L296Q | S342P | P386Y |
| N011P | Y066T | S133E | Y199P | R244V | L296R | S342Q | T387C |
| N011T | Y066V | S133F | Y199R | R244Y | L296S | S342R | T387E |
| N011W | I067D | S133G | Y199S | N245A | L296T | S342T | T387F |
| N011Y | I067E | S133H | Y199W | N245C | L296V | S342Y | T387G |
| V012G | I067G | S133L | N200A | N245F | L296W | Q343C | T387H |
| V012H | I067P | S133M | N200F | N245L | L296Y | Q343D | T387I |
| V012W | I067R | S133N | N200G | N245P | G297C | Q343F | T387L |
| P013E | I067T | S133P | N200H | N245Q | G297E | Q343I | T387M |
| P013G | I067W | S133R | N200K | N245R | G297H | Q343P | T387N |
| P013I | D068A | S133T | N200L | N245S | G297L | Q343W | T387V |
| P013L | D068C | S133V | N200M | N245T | G297N | V344F | T387W |
| P013M | D068G | S133W | N200P | N245V | G297P | V344G | T387Y |
| P013V | D068I | I134A | N200Q | R246A | G297Q | V344H | L388C |
| F014A | D068L | I134C | N200R | R246C | G297R | V344L | L388G |
| F014E | D068P | I134D | N200S | R246D | G297S | V344M | L388P |
| F014G | D068V | I134F | N200W | R246E | G297T | V344N | L388Q |
| F014H | D068Y | I134G | N200Y | R246G | G297Y | V344P | L388S |
| F014K | S069N | I134H | G201A | R246H | A298C | V344Q | E389F |
| F014N | S069T | I134K | G201F | R246I | A298E | V344R | E389V |
| F014P | I070Q | I134P | G201L | R246K | A298L | V344S | D390A |
| F014Q | T071P | I134Q | G201M | R246L | A298M | V344T | D390C |
| F014W | G072C | I134R | G201N | R246M | A298N | V344W | D390E |
| L015E | G072F | I134S | G201P | R246P | A298P | V344Y | D390F |
| L015F | G072H | I134W | G201R | R246S | A298Q | L345A | D390G |
| L015G | G072I | E135P | G201S | R246T | A298S | L345C | D390H |
| L015K | G072P | L136P | G201T | R246V | A298T | L345E | D390L |
| L015N | G072V | V137F | G201V | R246W | A298W | L345H | D390N |
| L015P | G072W | V137G | G201W | V247A | A298Y | L345K | D390P |
| L015Q | V073P | V137H | S202A | V247C | S299A | L345N | D390R |
| L015R | V075D | V137N | S202E | V247F | S299C | L345Q | D390S |
| L015S | V075G | V137P | S202F | V247H | S299D | L345R | D390T |
| L015Y | V075P | V137R | S202G | V247N | S299F | L345T | D390V |
| W016A | N076A | V137W | S202H | V247P | S299G | L345V | D390W |
| W016C | N076C | V137Y | S202K | V247Q | S299H | L345Y | D390Y |
| W016D | N076F | Q138V | S202N | V247R | S299L | C346A | L391A |
| W016E | N076G | Q139P | S202P | V247S | S299M | C346D | L391D |
| W016F | N076I | Q143C | S202Q | V247T | S299P | C346F | L391G |
| W016G | N076K | Q143H | S202R | V247W | S299Q | C346G | L391H |
| W016H | N076L | Q143P | S202V | V247Y | S299T | C346I | L391K |
| W016K | N076P | Q143R | S202W | R248C | G300A | C346K | L391N |
| W016M | N076Q | Q143S | S202Y | R248D | G300C | C346L | L391P |
| W016P | N076R | Q143T | C203A | R248E | G300D | C346M | L391Q |
| W016R | N076S | L144A | C203D | R248G | G300E | C346P | L391R |
| W016S | N076T | L144E | C203E | R248I | G300F | C346R | L391S |
| W016T | N076V | L144F | C203G | R248M | G300L | C346S | L391T |
| W016Y | N076W | L144I | C203H | R248P | G300M | C346T | L391V |
| A017D | G077D | L144K | C203L | R248T | G300N | C346V | L391W |
| A017E | G077E | L144P | C203M | E249A | G300P | C346W | L391Y |
| A017G | G077L | L144Q | C203N | E249G | G300Q | Q347C | E392C |
| A017H | G077P | L144S | C203Q | E249H | G300S | Q347F | E392P |
| A017I | G077Q | L144V | C203R | E249I | G300T | Q347I | Q393C |
| A017L | G077R | L144Y | C203S | E249K | G300V | Q347P | Q393P |
| A017N | G077T | S145T | C203T | E249M | G300W | Q347T | F394A |
| A017P | G077V | S145W | C203V | E249Q | I301E | Q347V | F394D |
| A017Q | G078A | A149E | F204A | E249S | I301G | Q347W | F394E |
| A017R | G078D | A149P | F204C | E249Y | I301H | E348C | F394G |
| A017S | G078I | T150V | F204E | A250C | I301K | E348H | F394I |
| A017T | G078M | K152L | F204G | A250F | I301M | E348I | F394K |
| A017V | G078P | A153E | F204H | A250G | I301N | E348L | F394N |
| A017W | G078T | A153F | F204I | A250H | I301P | E348P | F394P |
| A017Y | G078Y | A153M | F204K | A250K | I301Q | E348Q | F394Q |
| W018C | I079A | A153P | F204Q | A250L | I301R | E348R | F394R |
| W018D | I079D | A153R | F204R | A250M | I301S | E348T | F394S |
| W018F | I079F | A153T | F204S | A250N | I301W | E348V | F394T |
| W018G | I079G | A153V | F204T | A250P | I301Y | E348W | F394V |
| W018H | I079H | K154D | V206C | A250Q | V302C | E348Y | S395C |
| W018I | I079K | K154E | V206D | A250R | V302D | Q349D | S395L |
| W018L | I079N | K154G | V206F | A250S | V302E | Q349F | S395M |
| W018M | I079P | K154P | V206G | A250T | V302F | Q349G | S395P |
| W018P | I079S | K154S | V206P | A250V | V302G | Q349P | E396C |
| W018Q | I079W | K154W | V206Y | A250W | V302H | Q349V | E396F |
| W018S | I079Y | K154Y | E207A | I251D | V302L | Q349W | E396G |
| W018T | P080A | Q155P | E207F | I251F | V302M | Q349Y | E396I |
| W018V | P080D | Q155Y | E207G | I251G | V302P | G350A | E396P |
| W018Y | P080E | E156P | E207M | I251H | V302R | G350D | E396Y |
| N019A | P080F | F157A | E207P | I251K | V302S | G350E | K397A |
| N019C | P080G | F157C | E207Q | I251P | V302T | G350F | K397C |
| N019F | P080I | F157D | E207R | I251S | V302Y | G350H | K397E |
| N019G | P080K | F157E | E207S | I251T | I303A | G350K | K397F |
| N019H | P080L | F157G | E207T | I251W | I303C | G350L | K397G |
| N019I | P080M | F157H | E207V | R252A | I303D | G350M | K397I |
| N019L | P080N | F157I | E207W | R252D | I303E | G350N | K397L |
| N019M | P080R | F157K | I208D | R252E | I303F | G350P | K397M |
| N019P | P080S | F157L | I208G | R252F | I303G | G350R | K397P |
| N019Q | P080T | F157M | I208P | R252G | I303K | G350S | K397Q |
| N019R | P080V | F157P | I208W | R252H | I303L | G350T | K397T |
| N019S | P080Y | F157Q | K209C | R252I | I303M | G350V | K397V |
| N019V | Q081A | F157R | K209P | R252K | I303R | G350Y | F398A |
| N019W | Q081C | F157S | R210A | R252L | I303W | V351C | F398C |
| N019Y | Q081E | F157T | R210C | R252N | I303Y | V351D | F398E |
| A020D | Q081G | F157V | R210D | R252P | W304A | V351E | F398G |
| A020E | Q081H | E158D | R210E | R252S | W304C | V351F | F398H |
| A020F | Q081L | E158K | R210G | R252T | W304D | V351H | F398I |
| A020H | Q081N | E158P | R210K | R252Y | W304G | V351N | F398L |
| A020K | Q081P | E158R | R210M | V253A | W304I | V351R | F398N |
| A020L | Q081S | E158Y | R210N | V253D | W304M | V351W | F398P |
| A020N | Q081V | K159W | R210P | V253E | W304N | V351Y | F398R |
| A020P | Q081W | K159Y | R210S | V253G | W304P | C352A | F398S |
| A020R | Q081Y | G161W | R210T | V253H | W304Q | C352D | F398T |
| A020T | K082W | D163C | R210V | V253L | W304S | C352E | F398V |
| A020V | K082Y | D163P | R210W | V253M | W304T | C352F | F398W |
| A020Y | I083E | F164A | R210Y | V253N | W304V | C352G | F398Y |
| P021A | I083K | F164C | N211C | V253Q | W304Y | C352K | Y399D |
| P021C | S084Y | F164D | N211F | V253R | G305L | C352M | Y399P |
| P021D | L085A | F164E | N211G | V253S | G305P | C352P | C400A |
| P021E | L085C | F164G | N211H | V253W | G305Q | C352Q | C400D |
| P021G | L085D | F164H | N211I | S254C | G305R | C352R | C400E |
| P021H | L085E | F164N | N211K | S254D | G305S | C352S | C400F |
| P021I | L085F | F164P | N211M | S254E | G305T | C352T | C400G |
| P021L | L085G | F164Q | N211P | S254G | G305V | C352V | C400I |
| P021M | L085H | F164R | N211R | S254I | G305Y | C352W | C400L |
| P021R | L085N | L165C | N211S | S254K | T306A | C352Y | C400M |
| P021S | L085Q | L165H | N211T | S254L | T306C | I353C | C400P |
| P021T | L085S | L165P | N211V | S254P | T306H | I353F | C400Q |
| P021V | L085T | L165T | N211W | S254Q | T306I | I353G | C400R |
| P021W | Q086C | V166D | D212A | S254R | T306L | I353H | C400S |
| S022C | Q086P | E167V | D212G | S254T | T306V | I353K | C400T |
| S022E | D087P | T168A | D212H | S254V | T306W | I353L | C400V |
| S022G | H088A | T168C | D212I | S254W | T306Y | I353M | C400Y |
| S022K | H088C | T168D | D212K | S254Y | L307C | I353Q | S401C |
| S022P | H088E | T168E | D212L | K255C | | I353R | S401F |
| E023A | H088F | T168F | D212M | K255D | L307I | I353S | S401H |
| E023F | H088G | T168G | D212P | K255L | L307P | I353W | S401K |
| E023L | H088I | T168K | D212V | K255P | S308C | R354C | S401R |
| E023M | H088K | T168L | D212W | K255V | S308F | R354D | S401W |
| E023N | H088L | T168P | D213P | K255W | S308L | R354E | S401Y |
| E023P | H088M | T168R | D213S | I256C | S308M | R354G | C402A |
| E023R | H088P | T168S | L214A | I256D | S308V | R354H | C402D |
| E023S | H088R | T168V | L214C | I256E | S308W | R354I | C402E |
| E023T | H088S | T168W | L214D | I256G | S308Y | R354K | C402F |
| E023V | H088T | T168Y | L214E | I256P | M310C | R354L | C402L |
| C025D | H088V | I169A | L214G | P257D | M310E | R354M | C402M |
| C025E | H088Y | I169D | L214H | D258L | M310F | R354P | C402P |
| C025F | L089A | I169F | L214K | D258P | M310K | R354Q | C402Q |
| C025G | L089D | I169G | L214N | D258V | M310L | R354S | C402R |
| C025H | L089E | I169H | L214P | D258W | R311C | R354V | C402S |
| C025I | L089G | I169K | L214R | K260C | R311E | R354W | C402T |
| C025K | L089Q | I169N | L214S | K260P | R311F | R354Y | C402V |
| C025L | L089S | I169P | L214T | S261P | R311I | K355D | C402W |
| C025N | L089T | I169Q | L214Y | P262A | R311L | K355F | C402Y |
| C025P | L089W | I169S | S215C | P262D | R311P | K355G | Y403A |
| C025R | L089Y | I169T | S215P | P262E | R311V | K355H | Y403C |
| C025S | D090C | I169Y | W216D | P262F | R311W | K355L | Y403E |
| C025T | D090G | K170C | W216E | P262G | S312C | K355M | Y403G |
| C025V | K091D | K170D | W216G | P262H | S312E | K355N | Y403H |
| C025Y | K091E | K170E | W216H | P262I | S312M | K355P | Y403K |
| G027C | K091F | K170G | W216I | P262K | S312V | K355Q | Y403L |
| L033C | K091G | K170M | W216K | P262Q | S312W | K355R | Y403M |
| L033D | K091H | K170P | W216L | P262R | M313C | K355S | Y403N |
| L033H | K091I | K170W | W216M | P262S | K314C | K355T | Y403P |
| L033N | K091L | K170Y | W216N | P262T | K314L | K355V | Y403Q |
| L033V | K091N | L171C | W216P | P262V | K314W | K355W | Y403R |
| L033Y | K091T | L171D | W216Q | P262W | S315C | K355Y | Y403T |
| D034I | A092E | L171H | W216R | P262Y | S315I | N356C | S404C |
| D034L | A092F | L171M | W216T | L263E | S315V | N356G | S404D |
| D034N | A092H | L171N | W216V | L263F | C316E | N356K | S404F |
| D034S | A092K | L171R | L217A | L263P | C316G | N356L | S404G |
| D034T | A092P | L171S | L217C | L263Q | C316I | N356P | S404H |
| D034V | A092Q | L171W | L217G | L263W | C316K | N356R | S404L |
| M035A | A092R | L171Y | L217H | P264D | C316L | N356T | S404M |
| M035D | A092W | G172D | L217P | P264E | C316M | N356V | S404N |
| M035G | A092Y | G172E | L217Q | P264F | C316P | N356W | S404R |
| M035P | K094G | G172I | L217S | P264G | C316R | W357D | S404V |
| M035R | K094P | G172L | L217T | P264L | C316S | W357E | S404W |
| M035S | D095A | G172P | L217V | P264M | C316T | W357F | S404Y |
| S036C | D095C | G172Q | L217W | P264R | C316V | W357G | T405C |
| S036F | D095E | G172T | W218A | P264T | C316W | W357L | T405I |
| S036V | D095F | G172V | W218I | P264V | C316Y | W357M | T405V |
| S036W | D095G | G172W | W218K | P264W | L317G | W357Q | L406P |
| S036Y | D095H | G172Y | W218L | P264Y | L317P | W357R | L406R |
| L037C | D095K | K173D | W218P | V265A | L318C | N358E | C408A |
| L037E | D095L | K173E | W218S | V265D | L318P | N358H | C408E |
| L037G | D095M | K173G | W218V | V265F | L318W | N358I | C408F |
| L037N | D095P | K173H | N219P | V265G | L319C | N358K | C408G |
| L037S | D095Q | K173I | E220G | V265H | L319E | N358P | C408I |
| F038E | D095S | K173L | E220K | V265K | L319F | N358Q | C408K |
| F038G | D095V | K173M | E220N | V265L | L319G | N358R | C408L |
| F038K | D095W | K173P | E220P | V265M | L319H | N358W | C408P |
| F038L | D095Y | K173S | E220R | V265N | L319I | S359A | C408R |
| F038N | I096A | K173V | E220W | V265Q | L319K | S359F | C408S |
| F038Q | I096C | K173W | S221D | V265R | L319M | S359G | C408T |
| F038R | I096G | K173Y | S221E | V265S | L319P | S359L | C408V |
| F038T | I096H | L174P | S221H | F266A | L319Q | S359P | C408W |
| F038W | I096P | L175C | S221K | F266C | L319R | S359W | C408Y |
| S039C | I096R | L175D | S221P | F266G | L319S | S360A | E410W |
| S039D | I096S | L175G | S221R | F266H | L319V | S360C | K411D |
| S039F | I096T | L175K | T222P | F266M | L319W | S360E | K411E |
| S039W | I096W | L175P | T222Y | F266P | L319Y | S360F | K411F |
| F040A | F098P | L175R | A223C | F266Q | D320C | S360G | K411G |
| F040D | Y099C | L175S | A223D | F266R | D320P | S360I | A412E |
| F040E | Y099E | R176A | A223E | F266S | D320V | S360K | A412H |
| F040G | Y099G | R176C | A223G | F266T | N321E | S360L | D413H |
| F040K | Y099I | R176E | A223H | F266V | N321M | S360M | D413I |
| F040N | Y099N | R176F | A223K | F266W | N321P | S360P | D413K |
| F040R | Y099P | R176G | A223L | A267D | Y322C | S360Q | D413L |
| F040S | Y099V | R176H | A223P | A267G | Y322D | S360R | D413P |
| F040T | Y099W | R176I | A223Q | A267H | Y322E | S360V | V414A |
| F040V | M100C | R176P | A223R | A267I | Y322G | D361A | V414D |
| I041Q | M100E | R176Q | A223S | A267K | Y322I | D361C | V414E |
| G042D | M100F | R176S | A223T | A267N | Y322L | D361E | V414G |
| G042E | M100G | R176T | A223V | A267R | Y322N | D361G | V414H |
| G042H | M100N | R176V | A223W | A267S | Y322P | D361M | V414K |
| G042I | M100P | R176W | A223Y | A267W | Y322R | D361N | V414R |
| G042K | M100R | P177A | L224A | Y268A | Y322S | D361P | V414S |
| G042L | M100S | P177C | L224D | Y268C | Y322T | D361Q | V414T |
| G042M | M100T | P177D | L224E | Y268F | Y322V | D361R | K415C |
| G042P | M100W | P177F | L224F | Y268G | Y322W | D361S | K415D |
| G042Q | M100Y | P177G | L224G | Y268H | M323A | D361V | K415E |
| G042R | P101A | P177H | L224M | Y268K | M323C | D361W | K415P |
| G042S | P101C | P177L | L224P | Y268L | M323E | Y362A | D416C |
| G042T | P101F | P177M | L224Q | Y268N | M323G | Y362C | D416S |
| G042V | P101H | P177Q | L224R | Y268P | M323H | Y362E | T417A |
| S043A | P101I | P177R | L224S | Y268Q | M323K | Y362G | T417D |
| S043E | P101K | P177S | L224T | Y268S | M323N | Y362H | T417E |
| S043F | P101L | P177T | L224W | Y268T | M323R | Y362K | T417F |
| S043G | P101M | P177V | L224Y | Y268V | M323S | Y362L | T417G |
| S043I | P101N | P177W | Y225A | Y268W | M323T | Y362M | T417H |
| S043K | P101Q | N178E | Y225D | T269E | M323V | Y362N | T417K |
| S043L | P101R | N178I | Y225E | T269K | E324C | Y362P | T417M |
| S043Q | P101S | N178L | Y225G | T269L | E324F | Y362R | T417P |
| S043R | P101T | N178V | Y225H | T269M | E324P | Y362S | T417Q |
| S043V | V102P | N178W | Y225K | T269N | E324V | Y362T | T417R |
| P044A | D103A | N178Y | Y225P | T269P | E324W | Y362V | A419D |
| P044C | D103E | H179W | Y225Q | T269Q | E324Y | Y362W | A419P |
| P044F | D103F | L180A | Y225R | T269R | T325C | L363A | V420A |
| P044G | D103G | L180C | Y225T | R270A | T325R | L363C | V420D |
| P044H | D103H | L180E | Y225V | R270C | I326E | L363D | V420F |
| P044I | D103I | L180P | Y225W | R270E | I326G | L363E | V420G |
| P044L | D103L | L180R | P226A | R270F | I326H | L363F | V420H |
| P044N | D103Q | L180S | P226C | R270G | I326N | L363G | V420K |
| P044Q | D103R | W181A | P226D | R270H | I326W | L363H | V420L |
| P044R | D103T | W181C | P226E | R270I | L327A | L363I | V420N |
| P044S | D103V | W181D | P226F | R270P | L327E | L363P | V420R |
| P044T | D103W | W181E | P226G | R270Y | L327F | L363Q | V420S |
| P044W | D103Y | W181F | P226L | I271A | L327G | L363R | V420T |
| P044Y | N104F | W181H | P226N | I271D | L327H | L363S | V420W |
| R045A | N104P | W181I | P226Q | I271E | L327N | L363T | V420Y |
| R045D | N104W | W181K | P226R | I271H | L327Q | L363V | V422C |
| R045F | L105C | W181L | P226S | I271K | L327R | L363W | V422D |
| R045G | L105M | W181R | P226T | I271T | L327S | H364A | V422G |
| R045P | L105N | W181S | P226V | I271W | L327T | H364C | V422H |
| R045W | G106A | W181V | P226W | V272A | L327V | H364D | V422L |
| I046P | G106C | G182A | P226Y | V272H | L327W | H364E | V422M |
| I046W | G106D | G182C | S227A | V272L | L327Y | H364F | V422N |
| N047V | G106F | G182D | S227F | V272N | P329C | H364G | V422Q |
| A048P | G106H | G182E | S227G | V272P | P329F | H364K | V422R |
| T049C | G106L | G182H | S227H | V272W | P329G | H364L | V422S |
| T049D | G106M | G182N | S227I | F273A | P329H | H364M | V422Y |
| T049G | G106N | G182P | S227K | F273C | P329I | H364P | C423A |
| T049H | G106P | G182Q | S227L | F273D | P329K | H364R | C423D |
| T049P | G106S | G182R | S227M | F273G | P329L | H364S | C423E |
| | G106W | G182S | S227P | F273I | P329N | H364T | C423F |
| Q051C | G106Y | G182T | S227Q | F273L | P329Q | H364V | C423G |
| Q051F | M107A | G182V | S227R | F273P | P329R | H364Y | C423H |
| Q051I | M107C | G182Y | S227T | F273Q | P329S | L365A | C423L |
| Q051M | M107H | Y183C | S227V | F273S | P329T | L365C | C423M |
| Q051P | M107K | Y183D | S227W | F273V | P329V | L365D | C423P |
| Q051T | M107P | Y183E | S227Y | F273W | P329W | L365E | C423Q |
| Q051W | M107Q | Y183G | I228A | T274C | P329Y | L365G | C423R |
| Q051Y | M107S | Y183I | I228E | T274E | Y330A | L365M | C423S |
| G052C | M107V | Y183K | I228F | T274G | Y330C | L365N | C423T |
| G052E | M107W | Y183N | I228G | T274H | Y330D | L365P | C423V |
| G052F | A108D | Y183P | I228H | T274N | Y330E | L365Q | C423W |
| G052W | A108E | Y183Q | I228L | T274Q | Y330G | L365R | I424A |
| G052Y | A108F | Y183R | I228M | T274W | Y330I | L365S | I424C |
| V053A | A108K | Y183S | I228N | T274Y | Y330L | L365T | I424E |
| V053C | A108L | Y183V | I228P | D275A | Y330M | L365W | I424G |
| V053D | A108M | Y184A | I228R | D275F | Y330N | L365Y | I424H |
| V053E | A108P | Y184C | I228S | D275G | Y330P | N366A | I424N |
| V053G | A108Q | Y184D | I228T | D275I | Y330R | N366C | I424Q |
| V053H | A108T | Y184E | I228W | D275K | Y330S | N366E | I424R |
| V053L | A108V | Y184F | Y229E | D275L | Y330V | N366F | I424S |
| V053N | A108Y | Y184G | Y229F | D275M | Y330W | N366G | I424W |
| V053P | V109C | Y184H | Y229G | D275Q | I331A | N366K | I424Y |
| V053Q | V109D | Y184K | Y229K | D275T | I331C | N366M | A425E |
| V053R | V109E | Y184L | Y229L | D275V | I331D | N366P | A425L |
| V053S | V109L | Y184M | Y229P | D275W | I331E | N366Q | A425P |
| V053T | V109M | Y184P | Y229Q | Q276F | I331F | N366R | A425W |
| V053W | V109R | Y184R | Y229T | Q276P | I331H | N366T | A425Y |
| V053Y | V109T | Y184S | Y229V | Q276W | I331K | N366W | D426C |
| T054D | V109W | Y184V | Y229W | L278M | I331Q | P367E | D426F |
| T054E | I110F | L185A | L230A | L278P | I331R | P367F | D426M |
| T054G | I110K | L185D | L230E | K279A | I331S | P367I | D426R |
| T054P | I110L | L185E | L230G | K279C | I331T | P367L | G427A |
| T054R | I110M | L185F | L230H | K279F | I331W | P367M | G427C |
| T054Y | I110P | L185G | L230K | K279G | I331Y | P367Q | G427F |
| I055A | I110W | L185I | L230M | K279L | I332A | P367V | G427L |
| I055D | D111H | L185K | L230N | K279W | I332C | D368C | G427P |
| I055G | D111I | L185P | L230P | K279Y | I332D | D368P | |
| I055H | D111Q | L185R | L230R | F280D | I332E | D368W | G427V |
| I055N | W112C | L185S | L230S | F280I | I332F | N369C | G427W |
| I055P | W112E | L185T | L230T | F280L | I332G | N369E | G427Y |
| I055Q | W112G | L185V | L230V | F280M | I332H | N369F | V428A |
| I055R | W112H | L185W | L230W | F280N | I332K | N369I | V428C |
| I055T | W112L | L185Y | L230Y | F280R | I332L | N369K | V428D |
| I055V | W112N | F186A | N231A | F280S | I332N | N369L | V428E |
| I055Y | W112P | F186D | N231C | F280T | I332P | N369P | V428G |
| F056A | W112S | F186G | N231D | F280V | I332R | N369Q | V428H |
| F056C | E113R | F186H | N231F | F280W | I332S | N369V | V428N |
| F056E | E113V | F186I | N231G | L281A | I332T | N369W | V428R |
| F056G | E114I | F186K | N231H | L281D | I332Y | F370A | V428S |
| F056H | E114L | F186L | N231I | L281G | N333G | F370D | V428Y |
| F056I | E114P | F186N | N231K | L281H | N333H | F370E | C429A |
| F056K | E114T | F186P | N231L | L281I | N333I | F370G | C429D |
| F056L | E114V | F186Q | N231P | L281K | N333K | F370H | C429K |
| F056P | W115A | F186R | N231Q | L281N | N333P | F370K | C429L |
| F056R | W115C | F186S | N231R | L281P | N333R | F370L | C429N |
| F056S | W115D | F186V | N231S | L281Q | N333S | F370N | C429P |
| F056T | W115F | F186W | N231V | L281R | N333T | F370P | C429S |
| F056V | W115G | P187A | T232C | L281S | N333W | F370Q | C429T |
| F056W | W115H | P187F | T232G | L281V | N333Y | F370R | C429V |
| Y057A | W115I | P187G | T232H | L281W | V334A | F370S | C429W |
| Y057D | W115K | P187H | T232K | S282F | V334C | F370V | C429Y |
| Y057F | W115L | P187I | T232L | S282L | V334D | F370Y | I430A |
| Y057G | W115M | P187L | T232N | S282V | V334E | A371P | I430D |
| Y057I | W115R | P187M | T232P | S282W | V334G | A371W | I430E |
| Y057L | W115S | P187N | T232Q | S282Y | V334M | I372A | I430L |
| Y057M | W115V | P187Q | T232V | Q283A | V334N | I372D | I430M |
| Y057P | W115Y | P187R | T232Y | Q283C | V334R | I372E | I430N |
| Y057Q | R116A | P187S | Q233D | Q283D | V334S | I372F | I430S |
| Y057R | R116C | P187T | Q233I | Q283F | T335F | I372G | I430T |
| Y057V | R116D | P187V | Q233P | Q283W | T335G | I372H | I430V |
| Y057W | R116E | P187W | Q233S | D284C | T335H | I372K | D431P |
| V058A | R116G | P187Y | Q233T | D284I | T335I | I372L | A432C |
| D059A | R116H | D188A | Q234A | D284P | T335K | I372N | A432F |
| D059E | R116I | D188C | Q234D | E285K | T335L | I372P | A432I |
| D059I | R116L | D188F | Q234E | E285P | T335P | I372R | A432K |
| D059L | R116N | D188G | Q234G | E285R | T335V | I372S | A432L |
| D059M | R116P | D188H | Q234H | E285T | T335W | I372T | A432M |
| D059P | R116Q | D188L | Q234N | E285V | T335Y | I372V | A432P |
| D059R | R116S | D188M | Q234P | L286A | L336A | I372W | A432Y |
| D059T | R116V | D188N | Q234S | L286C | L336E | Q373C | L434H |
| D059V | R116W | D188P | Q234T | L286D | L336F | Q373P | L434K |
| D059W | P117D | D188Q | Q234V | L286F | L336G | Q373W | L434P |
| D059Y | P117G | D188R | Q234W | L286H | L336K | L374D | L434Q |
| R060A | P117I | D188S | S235F | L286K | L336N | L374E | L434R |
| R060D | P117K | D188T | S235L | L286M | L336P | E375C | L434W |
| R060F | P117N | D188V | S235M | L286P | L336R | E375F | P437T |
| R060G | P117Q | D188W | S235R | L286T | L336S | E375P | M438Y |
| R060H | P117R | C189A | S235W | L286Y | L336T | E375V | E439N |
| R060I | P117S | C189E | S235Y | V287A | L336V | E375Y | E439R |
| R060L | P117V | C189G | P236C | V287C | R121G | K376I | T440Q |
| R060N | P117W | C189H | W119L | V287D | R121H | K376P | E441R |
| R060P | T118C | C189K | W119N | V287E | R121K | K376W | E442M |
| R060Q | T118D | C189L | W119P | V287G | R121L | G377C | E442N |
| R060S | T118E | C189M | W119R | V287K | R121M | G377I | E442S |
| R060T | T118G | C189N | R121A | V287L | R121P | G377L | P443D |
| T118R | T118P | T118W | R121C | R121F | G378D | G377V | G378E |
| T118Y | W119I | W119A | W119K | R121E | G378F | G378I | |

### Example 5

### Apparent Melting Temperature (Tm) of rHuPH20

[0743] In this example, the melting temperature (Tm) of rHuPH20 was determined by measuring the hydrodynamic radius of particles using dynamic light scattering. Particle size increase is presumably due to denaturation and subsequent aggregation of rHuPH20. As temperature increases, proteins will unfold with will lead to aggregate formation.

[0744] In brief, rHuPH20 (Lot HuB, 10 mg/mL stock) was diluted to 1 mg/mL in 25 mM Tris-HCl, pH 7.5. Z-average particle size was measured by dynamic light scattering using a Malvern Zeta sizer Nano-ZS as a function of increasing temperature. A total of 3 measurements were made at each temperature in a low volume quartz cuvette (Helma, 3.00 mm) The temperature started at 20° C., with a ramp of 2° C., to a final temperature of 66° C., with a 5 minute equilibration period at each temperature. Light scattering intensity was measured with a 173° backscatter detector equipped with the instrument and the cumulative Z-Average particle data were calculated with the DTS (dispersion technology software) software using a refractive index of 1.45 for the protein samples, and using a refractive index of 1.33 for water as dispersant. The inflection point on the temperature axis at which there is a significant increase in the particle size is considered to be the apparent Tm (melting temperature) where the protein is denatured and begins to aggregate.

[0745] The results are shown in Table 9 below, which sets forth the average particle size at various temperatures for rHuPH20. The data in Table 9 are an average of 3 measurements per point, at 2° C. temperature increments, with a 5 minute equilibration point. The results show that the Tm of rHuPH20 is about 44° C.

TABLE 9
Average particle size of rHuPH20

| Temp. (° C.) | rHuPH20 |
|---|---|
| 20 | 9.48 |
| 22 | 9.19 |
| 24 | 9.89 |
| 26 | 9.96 |
| 28 | 9.27 |
| 30 | 8.94 |
| 32 | 8.96 |
| 34 | 9.42 |
| 36 | 9.28 |
| 38 | 8.91 |
| 40 | 9.39 |
| 42 | 9.72 |
| 44 | 11.36 |
| 46 | 13.08 |
| 48 | 21.35 |
| 50 | 22.74 |
| 52 | 28.50 |
| 54 | 32.95 |
| 56 | 37.01 |
| Estimated Tm | 44° C. |

### Example 6

### Temperature Stability Profile of Wildtype PH20 and Variant F204P

[0746] 1. Wildtype Compared to the F204P-PH20 Variant

[0747] Supernatant of expressed wildtype PH20 and PH20 variant F204P generated in Example 2 were collected at 96 hours post-transfection and screened for hyaluronidase activity assay after incubation at various temperatures. Each collected supernatant was incubated for 10 minutes at 4° C., 45° C., 47° C., 49° C., 51° C., 53° C., 55° C. or 57° C., and then cooled on ice. After the incubation, each supernatant was serially diluted (9-fold, 27-fold, 81-fold and 243-fold) and hyaluronidase activity was assessed by the hyaluronidase activity assay as described in Example 3. Duplicate reactions were run for each sample. The reactions were stopped at 5 minutes after addition of TMB, and read immediately using the Molecular Device SPECTRAmax plus at the wavelength of OD 450 nm A standard curve was calculated by using a 4-parameter logistic curve to fit the OD 450 nm data and the estimated activity of the samples was interpolated from the standard curve and dilution factors. The activity of wildtype PH20 or F204P-PH20 at the different temperatures was represented as the percentage of the activity of the particular PH20 in the supernatant incubated at 4° C., which was set at 100%.

[0748] The results show that for wildtype PH20 and F204P, incubation at 45° C. and 47° C. resulted in a slight decrease in hyaluronidase activity with about 80% activity remaining after the 10 minute incubation. In contrast, the stability of wildtype PH20 decreased substantially when the supernatant was incubated at temperatures greater than 47° C., whereas the F204P-PH20 variant exhibited greater stability at higher temperatures. For example, wildtype PH20 exhibited about 55%-60% of the hyaluronidase activity after preincubation at 49° C. or 51° C., about 40% of the hyaluronidase activity after preincubation at 53° C., about 20%-25% of the hyaluronidase activity after preincubation at 55° C. and less than 20% of the hyaluronidase activity after preincubation at 57° C. The F204P-PH20 variant in supernatant incubated at 49° C., 51° C., 53° C. or 55° C. exhibited similar activity that was about 60% to 80% of the hyaluronidase activity of the PH20 in the supernatant incubated at 4° C. The hyaluronidase activity of the F204P-PH20 variant in supernatant incubated at 57° C. was about 50% of the hyaluronidase activity of the PH20 in the supernatant incubated at 4° C.

[0749] 2. F204P Temperature Profile at Higher Temperatures

[0750] Since the F204P-PH20 variant exhibited 50% of its hyaluronidase activity at the highest temperature tested of 55° C., the assay was further performed with the F204P-PH20 variant to assess its temperature profile at higher temperatures. The assay as described in part 1 was performed, except that supernatant of expressed F204P-PH20 variant was incubated at 4° C., 55° C., 57° C., 59° C., 61° C., 63° C., 65° C. or 70° C. Similar to the experiment described above, the hyaluronidase activity of the F204P-PH20 variant was about 80% after incubation at 55° C., and was about 60% after incubation at 57° C. The activity of the F204P-PH20 variant in supernatant incubated at temperatures above 57° C. steadily decreased. The hyaluronidase activity of the F204P-PH20 variant in supernatant incubated at 59° C. or 61° C. was about 40%, and the hyaluronidase activity of the F204P-PH20 variant in supernatant incubated at 63° C., 65° C. and 70° C. was about or less than 20%.

### Example 7

### Assay for and Identification of PH20 Uber-Thermophile Variants

[0751] Selected PH20 variants from Table 7 that exhibited an activity of 0.4 U/mL or higher were assayed for hyaluronidase activity at 52° C. Specifically, 1,708 different variants expressed in supernatant as described in Example 2 were screened for hyaluronidase activity using the assay described in Example 4 after preincubation of the supernatant at 4° C. or at 52° C. for 10 minutes. PH20 variants that exhibited greater activity after incubation at 52° C. compared to at 4° C. were selected.

[0752] 1. Primary Screen

[0753] Prior to incubating samples with bHA, supernatant containing the tested variant PH20 sample was diluted 1:25 in HEPES assay buffer/transfected supernatant into designated wells of an uncoated 4XHB plate. Two different transfected samples for each variant were used for incubation at each temperature (designated transfection I and transfection II). Thus, each variant was tested in duplicate at both 4° C. and 52° C. The samples were then preincubated at either 4° C. or 52° C. for 10 minutes, and then were cooled before assessing hyaluronidase activity. As a control, wildtype (unmodified) PH20 was used as a control for comparison of activity at each temperature.

[0754] The preparation of the bHA coated plates and blocking of the plates prior to addition of the transfected variant supernatants or wildtype PH20 was the same as described in Example 3. A standard curve using rHuPH20 was made as described in Example 3. One hundred microliters (100 μl) of each standard and sample were transferred to pre-designated wells of the bHA-coated and blocked plate and incubated for approximately 1.5 hours at 37° C. Thus, each variant was tested in quadruplicate due to the initial preincubation of two transfected samples expressing the variant (transfection I and transfection II), and then the further use of each sample in duplicate in the bHA assay. After the incubation, the plates were washed and binding to bHA was detected as described above in Example 3. Optical density (OD) was measured at 450 nm within 30 minutes of adding the stop solution.

[0755] Table 10 below sets forth the average OD of the duplicate samples for each tested transfected sample at 4° C. and 52° C., and the percent activity remaining at 52° C. compared to 4° C. (% Act. 52° C. vs. 4° C.) for each transfection. The average percent remaining activity of the variants from both transfections also is set forth. For comparison, the Table also depicts the percent activity of wildtype (unmodified) PH20 control at 52° C. compared to 4° C. as tested in the same assay plate. SEQ ID NOS with references to sequences in the Sequence Listing are provided for exemplary variants.

TABLE 10
Hyaluronidase Activity After Incubation at 4° C. and 52° C.

| | Transfection I | | | Transfection II | | | Average | | |
|---|---|---|---|---|---|---|---|---|---|
| | | | % Act. | | | % Act. | % Act. | % Act. | SEQ |
| | | | 52° C. | | | 52° C. | 52° C. | wt 52° C. | ID |
| Variant | 4° C. | 52° C. | vs. 4° C. | 4° C. | 52° C. | vs. 4° C. | vs. 4° C. | vs. 4° C. | NO |
| L001A | 1.33 | 0.47 | 35.60 | 1.22 | 0.34 | 27.88 | 31.74 | 19.42 | |
| L001E | 1.08 | 0.46 | 43.08 | 1.26 | 0.40 | 31.96 | 37.52 | 19.42 | |
| L001F | 1.38 | 0.32 | 23.07 | 1.17 | 0.31 | 26.68 | 24.87 | 17.29 | |
| L001G | 0.17 | 0.05 | 31.29 | 0.10 | 0.06 | 54.90 | 43.09 | 17.29 | |
| L001K | 1.09 | 0.23 | 21.10 | 1.04 | 0.18 | 17.59 | 19.35 | 17.29 | |
| L001N | 0.88 | 0.02 | 1.87 | 0.84 | 0.01 | 1.66 | 1.77 | 17.29 | |
| L001P | 0.35 | 0.12 | 34.80 | 0.36 | 0.11 | 31.34 | 33.07 | 17.29 | |
| L001Q | 1.71 | 0.55 | 32.39 | 2.22 | 0.78 | 35.33 | 33.86 | 30.28 | |
| L001R | 1.79 | 0.63 | 35.22 | 1.63 | 0.42 | 25.72 | 30.47 | 17.29 | |
| L001S | 1.22 | 0.56 | 45.69 | 1.68 | 0.32 | 19.23 | 32.46 | 17.29 | |
| L001T | 2.01 | 0.69 | 34.30 | 2.15 | 0.73 | 33.96 | 34.13 | 11.57 | |
| L001V | 1.51 | 0.47 | 31.39 | 1.22 | 0.43 | 35.59 | 33.49 | 28.17 | |
| L001W | 0.66 | 0.06 | 9.19 | 0.71 | 0.15 | 20.66 | 14.93 | 11.57 | |
| N002Q | 0.91 | 0.23 | 24.75 | 1.02 | 0.26 | 25.36 | 25.05 | 32.12 | |
| N002S | 0.99 | 0.28 | 28.26 | 1.13 | 0.23 | 20.42 | 24.34 | 32.12 | |
| N002V | 0.34 | 0.14 | 41.30 | 0.50 | 0.13 | 26.58 | 33.94 | 32.12 | |
| F003Y | 1.15 | 0.35 | 30.23 | 0.97 | 0.22 | 22.91 | 26.57 | 11.57 | |
| R004T | 0.52 | 0.17 | 31.67 | 0.49 | 0.14 | 28.40 | 30.03 | 32.12 | |
| R004V | 0.35 | 0.18 | 50.57 | 0.38 | 0.14 | 35.89 | 43.23 | 32.12 | |
| A005H | 0.61 | 0.00 | 0.00 | 0.59 | 0.00 | 0.00 | 0.00 | 11.57 | |
| P006A | 1.03 | 0.36 | 35.27 | 0.81 | 0.23 | 28.06 | 31.66 | 11.57 | |
| P006K | 1.44 | 0.50 | 34.59 | 1.32 | 0.40 | 30.38 | 32.48 | 11.57 | |
| P006L | 0.39 | 0.11 | 28.97 | 0.34 | 0.11 | 32.50 | 30.73 | 37.72 | |
| P007M | 0.21 | 0.10 | 46.00 | 0.15 | 0.05 | 31.02 | 38.51 | 31.91 | |
| V008I | 0.75 | 0.28 | 37.87 | 0.78 | 0.28 | 36.22 | 37.05 | 36.38 | |
| V008L | 1.35 | 0.41 | 30.32 | 1.22 | 0.26 | 21.69 | 26.00 | 11.57 | |
| I009Q | 0.37 | 0.14 | 37.35 | 0.22 | 0.11 | 46.99 | 42.17 | 44.87 | |
| I009V | 0.60 | 0.20 | 33.75 | 0.60 | 0.21 | 34.47 | 34.11 | 44.87 | |
| P010D | 0.50 | 0.18 | 35.76 | 0.48 | 0.18 | 36.49 | 36.13 | 44.87 | |
| P010E | 0.65 | 0.23 | 35.45 | 0.67 | 0.12 | 18.58 | 27.01 | 44.87 | |
| P010G | 0.17 | 0.10 | 61.45 | 0.17 | 0.09 | 56.63 | 59.04 | 44.87 | 73 |
| P010N | 0.16 | 0.06 | 38.36 | 0.27 | 0.21 | 76.67 | 57.52 | 32.47 | 74 |
| P010R | 0.28 | 0.08 | 29.84 | 0.21 | 0.09 | 41.69 | 35.76 | 37.72 | |
| N011G | 5.55 | 3.53 | 63.61 | 3.66 | 2.75 | 75.15 | 69.38 | 11.57 | 229 |
| N011K | 0.63 | 0.23 | 36.21 | 1.11 | 0.49 | 43.85 | 40.03 | 2.40 | |
| N011S | 0.61 | 0.07 | 12.23 | 0.87 | 0.33 | 37.93 | 25.08 | 2.40 | |
| V012A | 0.88 | 0.31 | 34.92 | 1.62 | 0.59 | 36.24 | 35.58 | 2.40 | |
| V012E | 0.57 | 0.26 | 44.54 | 0.62 | 0.22 | 35.90 | 40.22 | 36.38 | |
| V012R | 0.57 | 0.00 | 0.00 | 1.36 | 0.00 | 0.00 | 0.00 | 2.40 | |
| V012S | 0.78 | 0.28 | 36.28 | 2.10 | 0.72 | 34.29 | 35.28 | 2.40 | |
| P013H | 0.28 | 0.12 | 42.12 | 0.34 | 0.21 | 61.07 | 51.60 | 27.54 | 76 |
| P013S | 0.48 | 0.20 | 42.44 | 0.46 | 0.16 | 35.71 | 39.08 | 37.91 | |
| P013T | 1.20 | 0.56 | 46.74 | 2.11 | 0.92 | 43.72 | 45.23 | 2.40 | |
| L015A | 0.69 | 0.57 | 82.43 | 0.95 | 0.98 | 103.11 | 92.77 | 30.98 | 132 |
| L015V | 2.42 | 2.50 | 103.33 | 1.98 | 2.13 | 107.86 | 105.60 | 44.87 | 105 |
| A020S | 1.77 | 0.92 | 52.08 | 1.15 | 0.48 | 41.68 | 46.88 | 33.75 | |
| S022H | 0.84 | 0.10 | 11.63 | 0.70 | 0.10 | 13.62 | 12.63 | 14.02 | |
| S022M | 0.28 | 0.10 | 35.33 | 0.29 | 0.10 | 33.85 | 34.59 | 37.72 | |
| S022T | 0.57 | 0.10 | 16.71 | 0.35 | 0.03 | 7.57 | 12.14 | 14.02 | |
| E023D | 0.89 | 0.12 | 13.68 | 0.79 | 0.14 | 17.52 | 15.60 | 14.02 | |
| F024I | 0.53 | 0.07 | 12.71 | 0.47 | 0.08 | 16.81 | 14.76 | 14.02 | |
| F024L | 1.62 | 0.60 | 36.86 | 1.71 | 0.65 | 37.74 | 37.30 | 28.26 | |
| F024M | 0.42 | 0.05 | 12.90 | 0.48 | 0.08 | 15.90 | 14.40 | 14.02 | |
| F024N | 1.08 | 0.25 | 23.34 | 1.00 | 0.26 | 26.43 | 24.89 | 14.02 | |
| F024T | 0.55 | 0.14 | 25.16 | 0.54 | 0.19 | 34.07 | 29.61 | 38.58 | |
| F024V | 0.32 | 0.04 | 12.40 | 0.32 | 0.07 | 22.47 | 17.44 | 17.34 | |
| F024Y | 0.65 | 0.14 | 22.05 | 0.94 | 0.18 | 19.48 | 20.77 | 17.34 | |
| L026A | 1.34 | 0.28 | 20.68 | 1.78 | 0.20 | 11.42 | 16.05 | 17.34 | |
| L026E | 1.21 | 0.20 | 16.08 | 1.27 | 0.14 | 10.85 | 13.47 | 17.34 | |
| L026G | 0.24 | 0.05 | 22.69 | 0.38 | 0.05 | 12.80 | 17.74 | 17.34 | |
| L026H | 0.12 | 0.02 | 12.70 | 0.26 | 0.01 | 5.63 | 9.17 | 17.34 | |
| L026I | 0.10 | 0.03 | 28.95 | 0.20 | 0.06 | 31.06 | 30.00 | 17.34 | |
| L026K | 1.36 | 0.49 | 36.18 | 1.32 | 0.37 | 28.37 | 32.27 | 38.58 | |
| L026M | 1.43 | 0.33 | 23.01 | 1.58 | 0.28 | 17.48 | 20.25 | 38.58 | |
| L026P | 0.89 | 0.52 | 58.94 | 1.00 | 0.59 | 59.03 | 58.98 | 30.98 | 79 |
| L026Q | 3.57 | 1.08 | 30.31 | 3.57 | 1.08 | 30.31 | 30.31 | 32.74 | |
| L026R | 0.64 | 0.59 | 92.63 | 0.74 | 0.66 | 89.23 | 90.93 | 30.98 | 142 |
| L026S | 1.13 | 0.69 | 61.17 | 1.52 | 0.96 | 63.38 | 62.27 | 30.98 | 334 |
| L026T | 0.98 | 0.31 | 31.26 | 1.71 | 0.79 | 45.95 | 38.61 | 32.74 | |
| L026V | 0.35 | 0.15 | 42.45 | 0.55 | 0.35 | 63.16 | 52.80 | 32.74 | 82 |
| L026W | 0.29 | 0.12 | 39.69 | 0.75 | 0.52 | 68.35 | 54.02 | 32.74 | 83 |
| L026Y | 0.82 | 0.27 | 32.66 | 1.39 | 1.06 | 76.14 | 54.40 | 32.74 | 84 |
| G027A | 3.19 | 1.43 | 44.85 | 2.35 | 1.00 | 42.33 | 43.59 | 34.04 | |
| G027E | 0.15 | 0.27 | 173.14 | 0.24 | 0.32 | 133.75 | 153.44 | 30.98 | 290 |
| G027F | 0.67 | 0.27 | 40.07 | 0.75 | 0.26 | 35.14 | 37.61 | 36.38 | |
| G027F | 0.53 | 0.12 | 22.34 | 0.53 | 0.08 | 14.59 | 18.47 | 38.58 | |
| V206I | 0.19 | 0.12 | 62.63 | 0.17 | 0.10 | 58.86 | 60.74 | 30.73 | 269 |
| G027I | 0.95 | 0.37 | 38.73 | 0.70 | 0.21 | 29.74 | 34.24 | 21.53 | |
| G027K | 0.33 | 0.14 | 42.12 | 0.26 | 0.12 | 45.49 | 43.81 | 32.94 | |
| G027L | 0.33 | 0.11 | 32.07 | 0.24 | 0.07 | 30.25 | 31.16 | 34.04 | |
| G027Q | 2.01 | 0.58 | 28.83 | 1.67 | 0.36 | 21.45 | 25.14 | 34.04 | |
| G027R | 2.26 | 0.63 | 27.69 | 3.95 | 1.70 | 42.97 | 35.33 | 32.94 | |
| G027S | 0.65 | 0.27 | 42.07 | 0.51 | 0.22 | 43.24 | 42.65 | 34.04 | |
| G027T | 0.85 | 0.40 | 46.61 | 0.67 | 0.23 | 34.08 | 40.34 | 21.53 | |
| G027W | 0.91 | 0.29 | 31.38 | 0.93 | 0.37 | 39.78 | 35.58 | 21.54 | |
| K028A | 0.80 | 0.44 | 55.10 | 0.67 | 0.29 | 43.24 | 49.17 | 21.53 | |
| K028D | 0.82 | 0.33 | 41.04 | 0.81 | 0.29 | 35.87 | 38.46 | 36.38 | |
| K028E | 0.38 | 0.16 | 42.67 | 0.32 | 0.13 | 41.45 | 42.06 | 32.94 | |
| K028F | 0.46 | 0.09 | 20.37 | 0.41 | 0.11 | 27.11 | 23.74 | 21.54 | |
| K028I | 0.18 | 0.06 | 32.58 | 0.14 | 0.08 | 57.65 | 45.12 | 21.54 | |
| K028L | 0.51 | 0.36 | 71.32 | 0.44 | 0.15 | 32.85 | 52.08 | 21.53 | 87 |
| K028M | 0.47 | 0.23 | 48.87 | 0.47 | 0.14 | 29.74 | 39.31 | 21.53 | |
| K028N | 0.50 | 0.15 | 29.26 | 0.37 | 0.11 | 30.81 | 30.03 | 21.54 | |
| K028R | 0.63 | 0.21 | 32.70 | 0.56 | 0.14 | 25.60 | 29.15 | 32.94 | |
| K028S | 0.90 | 0.30 | 33.54 | 0.99 | 0.36 | 35.85 | 34.69 | 28.26 | |
| K028T | 1.14 | 0.26 | 22.59 | 1.07 | 0.22 | 20.48 | 21.53 | 33.16 | |
| K028V | 0.11 | 0.03 | 31.43 | 0.09 | 0.05 | 52.60 | 42.01 | 33.16 | |
| K028W | 0.43 | 0.19 | 44.01 | 0.45 | 0.12 | 25.83 | 34.92 | 21.53 | |
| F029A | 0.95 | 0.29 | 30.63 | 0.81 | 0.25 | 30.24 | 30.43 | 33.16 | |
| F029E | 1.54 | 0.89 | 57.70 | 1.44 | 0.62 | 42.72 | 50.21 | 21.53 | 88 |
| S261A | 0.62 | 0.67 | 107.59 | 0.98 | 0.43 | 43.95 | 75.77 | 26.81 | 196 |
| F029I | 4.84 | 1.67 | 34.54 | 5.64 | 1.66 | 29.40 | 31.97 | 33.16 | |
| F029K | 0.95 | 0.40 | 41.87 | 2.24 | 0.71 | 31.50 | 36.69 | 36.21 | |
| F029L | 0.43 | 0.24 | 55.85 | 0.42 | 0.23 | 55.11 | 55.48 | 36.21 | 90 |
| F029M | 0.92 | 0.35 | 38.44 | 1.16 | 0.47 | 40.77 | 39.60 | 36.21 | |
| F029P | 0.64 | 0.28 | 43.75 | 0.74 | 0.35 | 47.53 | 45.64 | 36.21 | |
| F029R | 0.76 | 0.23 | 30.21 | 0.71 | 0.21 | 29.46 | 29.83 | 32.94 | |
| F029S | 0.28 | 0.20 | 73.33 | 0.26 | 0.24 | 91.60 | 82.47 | 36.21 | 217 |
| F029T | 0.67 | 0.22 | 32.19 | 0.63 | 0.19 | 29.31 | 30.75 | 32.94 | |
| F029V | 1.99 | 0.54 | 27.09 | 2.17 | 0.63 | 29.01 | 28.05 | 36.21 | |
| F029W | 0.28 | 0.15 | 52.38 | 0.42 | 0.21 | 51.02 | 51.70 | 36.21 | 92 |
| D030A | 0.34 | 0.23 | 65.74 | 0.30 | 0.20 | 66.50 | 66.12 | 36.75 | 329 |
| D030F | 1.94 | 0.57 | 29.25 | 2.04 | 0.57 | 28.14 | 28.70 | 36.75 | |
| D030G | 3.30 | 1.15 | 34.99 | 3.94 | 1.41 | 35.73 | 35.36 | 36.75 | |
| D030H | 3.04 | 0.94 | 30.85 | 3.47 | 0.97 | 27.95 | 29.40 | 36.75 | |
| D030K | 0.61 | 0.17 | 27.66 | 0.56 | 0.13 | 22.31 | 24.99 | 32.94 | |
| D030L | 1.93 | 0.47 | 24.59 | 2.06 | 0.49 | 23.57 | 24.08 | 36.75 | |
| D030M | 2.55 | 0.78 | 30.40 | 3.19 | 0.79 | 24.69 | 27.54 | 36.75 | |
| D284A | 0.18 | 0.35 | 191.48 | 0.19 | 0.32 | 170.35 | 180.92 | 37.53 | 131 |
| D030Q | 1.74 | 0.36 | 20.78 | 1.48 | 0.32 | 21.53 | 21.15 | 38.58 | |
| D030R | 7.13 | 3.09 | 43.40 | 8.55 | 6.47 | 75.72 | 59.56 | 45.75 | 94 |
| D030S | 4.61 | 1.41 | 30.64 | 7.97 | 3.90 | 48.92 | 39.78 | 45.75 | |
| D030T | 3.23 | 1.04 | 32.29 | 5.37 | 2.89 | 53.90 | 43.09 | 45.75 | |
| D030V | 0.31 | 0.14 | 46.03 | 0.28 | 0.14 | 50.62 | 48.33 | 37.91 | |
| D030W | 1.04 | 0.40 | 38.54 | 1.68 | 0.89 | 52.72 | 45.63 | 45.75 | |
| E031A | 0.22 | 0.07 | 33.56 | 0.51 | 0.32 | 62.35 | 47.96 | 45.75 | |
| E031C | 4.81 | 1.83 | 38.00 | 9.55 | 6.68 | 69.94 | 53.97 | 45.75 | 95 |
| E031G | 3.24 | 1.00 | 30.78 | 4.44 | 8.22 | 185.23 | 108.00 | 45.75 | 103 |
| E031H | 0.30 | 0.00 | 0.00 | 0.27 | 0.13 | 47.67 | 23.84 | 30.28 | |
| E031I | 1.08 | 0.45 | 41.96 | 1.25 | 0.48 | 38.15 | 40.06 | 30.73 | |
| E031K | 3.39 | 1.93 | 56.82 | 1.91 | 0.70 | 36.70 | 46.76 | 41.87 | |
| E031L | 0.22 | 0.20 | 89.75 | 0.21 | 0.12 | 55.13 | 72.44 | 41.87 | 380 |
| E031P | 1.04 | 0.53 | 51.08 | 1.10 | 0.30 | 27.17 | 39.12 | 41.87 | |
| E031R | 4.09 | 1.59 | 39.01 | 3.94 | 1.18 | 29.98 | 34.50 | 41.87 | |
| E031S | 1.67 | 0.30 | 17.72 | 1.62 | 0.25 | 15.61 | 16.66 | 38.58 | |
| E031T | 3.66 | 0.76 | 20.85 | 2.19 | 0.54 | 24.76 | 22.81 | 40.82 | |
| E031V | 8.50 | 1.09 | 12.82 | 6.60 | 0.89 | 13.49 | 13.16 | 38.58 | |
| E031W | 1.36 | 0.63 | 46.13 | 1.33 | 0.29 | 21.50 | 33.82 | 41.87 | |
| E031Y | 1.45 | 0.58 | 40.15 | 1.12 | 0.32 | 28.37 | 34.26 | 41.87 | |
| P032A | 6.34 | 2.32 | 36.55 | 6.03 | 1.01 | 16.71 | 26.63 | 41.87 | |
| P032G | 1.95 | 0.90 | 46.27 | 1.85 | 0.76 | 40.91 | 43.59 | 35.82 | |
| P032K | 4.19 | 1.50 | 35.68 | 2.95 | 1.07 | 36.15 | 35.92 | 28.17 | |
| P032L | 0.83 | 0.26 | 31.55 | 0.84 | 0.25 | 29.50 | 30.52 | 28.15 | |
| P032M | 1.40 | 0.49 | 35.22 | 1.46 | 0.43 | 29.68 | 32.45 | 35.82 | |
| P032N | 0.99 | 0.36 | 36.12 | 1.20 | 0.35 | 29.21 | 32.67 | 28.15 | |
| P032Q | 0.65 | 0.45 | 68.76 | 0.64 | 0.50 | 78.03 | 73.40 | 35.82 | 200 |
| P032R | 1.28 | 0.54 | 41.78 | 1.07 | 0.46 | 43.00 | 42.39 | 35.82 | |
| P032S | 1.03 | 0.50 | 48.11 | 0.88 | 0.48 | 55.12 | 51.61 | 35.82 | 99 |
| P032T | 2.01 | 0.73 | 36.52 | 1.90 | 0.63 | 33.17 | 34.84 | 35.82 | |
| P032V | 0.23 | 0.11 | 46.10 | 0.15 | 0.08 | 55.78 | 50.94 | 34.09 | 100 |
| P032W | 0.55 | 0.35 | 63.21 | 0.54 | 0.33 | 61.07 | 62.14 | 29.51 | 337 |
| P032Y | 2.25 | 0.66 | 29.35 | 1.52 | 0.31 | 20.64 | 24.99 | 32.61 | |
| L033G | 0.21 | 0.27 | 126.89 | 0.20 | 0.29 | 144.75 | 135.82 | 29.51 | 149 |
| L033M | 0.22 | 0.35 | 164.50 | 0.25 | 0.31 | 121.74 | 143.12 | 29.51 | 150 |
| L033Q | 1.04 | 0.35 | 33.49 | 1.09 | 0.30 | 27.69 | 30.59 | 28.15 | |
| L033R | 0.24 | 0.33 | 139.71 | 0.18 | 0.63 | 342.47 | 241.09 | 29.51 | 151 |
| L033W | 0.58 | 0.39 | 67.85 | 0.47 | 0.51 | 108.62 | 88.23 | 29.51 | 154 |
| D034E | 0.44 | 0.43 | 99.31 | 0.49 | 0.34 | 69.12 | 84.22 | 29.51 | 182 |
| D034H | 0.19 | 0.40 | 205.94 | 0.31 | 0.57 | 183.44 | 194.69 | 29.51 | 155 |
| D034Q | 0.31 | 0.16 | 52.44 | 0.33 | 0.14 | 43.55 | 47.99 | 30.73 | |
| Q143K | 0.59 | 0.43 | 73.53 | 0.62 | 0.42 | 66.69 | 70.11 | 36.07 | 221 |
| M035F | 1.81 | 0.40 | 22.18 | 1.70 | 0.38 | 22.47 | 22.32 | 23.34 | |
| M035L | 0.70 | 0.28 | 39.58 | 0.83 | 0.26 | 31.93 | 35.75 | 23.34 | |
| M035Q | 1.22 | 0.30 | 24.26 | 1.03 | 0.26 | 24.94 | 24.60 | 23.34 | |
| M035T | 1.34 | 0.31 | 22.96 | 1.23 | 0.28 | 23.10 | 23.03 | 23.34 | |
| M035V | 0.78 | 0.29 | 36.72 | 0.81 | 0.26 | 31.87 | 34.30 | 23.34 | |
| M035Y | 1.75 | 0.46 | 26.18 | 2.13 | 0.49 | 23.10 | 24.64 | 23.34 | |
| S036G | 0.66 | 0.31 | 46.78 | 0.63 | 0.36 | 57.09 | 51.93 | 36.50 | 109 |
| S036H | 0.53 | 0.24 | 45.20 | 0.65 | 0.29 | 45.08 | 45.14 | 36.50 | |
| S036K | 0.51 | 0.26 | 51.66 | 0.80 | 0.32 | 40.02 | 45.84 | 36.50 | |
| S036R | 0.84 | 0.29 | 34.09 | 1.14 | 0.34 | 29.55 | 31.82 | 36.50 | |
| S036T | 0.76 | 0.32 | 42.31 | 0.97 | 0.35 | 36.51 | 39.41 | 36.50 | |
| L037F | 0.74 | 0.39 | 51.88 | 0.97 | 0.39 | 40.50 | 46.19 | 36.50 | |
| L037I | 0.26 | 0.13 | 51.54 | 0.23 | 0.13 | 56.26 | 53.90 | 30.73 | 110 |
| S315T | 1.63 | 2.36 | 144.57 | 1.95 | 1.13 | 57.57 | 101.07 | 21.73 | 115 |
| L037M | 0.42 | 0.19 | 46.48 | 0.38 | 0.15 | 40.58 | 43.53 | 30.73 | |
| F038Y | 0.63 | 0.29 | 46.49 | 0.55 | 0.64 | 117.23 | 81.86 | 26.61 | 188 |
| S039A | 1.40 | 0.66 | 46.78 | 3.16 | 1.27 | 40.32 | 43.55 | 26.61 | |
| S039N | 2.66 | 0.97 | 36.24 | 1.98 | 1.01 | 50.86 | 43.55 | 26.61 | |
| S039Q | 1.82 | 0.74 | 40.51 | 0.82 | 0.68 | 82.47 | 61.49 | 26.61 | 368 |
| S039R | 0.82 | 0.54 | 65.81 | 0.46 | 0.56 | 122.67 | 94.24 | 26.61 | 128 |
| S039T | 0.78 | 0.56 | 72.32 | 1.70 | 0.91 | 53.51 | 62.91 | 26.61 | 300 |
| F040L | 3.93 | 0.70 | 17.86 | 3.22 | 0.80 | 24.75 | 21.31 | 31.60 | |
| F040W | 2.17 | 1.11 | 51.21 | 1.34 | 0.36 | 26.79 | 39.00 | 27.87 | |
| I041A | 0.92 | 0.25 | 27.11 | 0.88 | 0.22 | 24.53 | 25.82 | 24.78 | |
| I041D | 0.14 | 0.10 | 72.43 | 0.18 | 0.10 | 53.30 | 62.86 | 24.78 | 166 |
| I041D | 0.18 | 0.13 | 72.85 | 0.17 | 0.11 | 61.38 | 67.12 | 28.63 | 166 |
| I041G | 0.16 | 0.00 | 0.00 | 0.23 | 0.00 | 0.00 | 0.00 | 20.11 | |
| I041N | 0.60 | 0.22 | 37.23 | 0.82 | 0.26 | 31.15 | 34.19 | 24.78 | |
| I041T | 0.28 | 0.21 | 76.31 | 0.51 | 0.24 | 47.52 | 61.92 | 24.78 | 167 |
| I041V | 3.30 | 1.11 | 33.66 | 3.60 | 1.15 | 31.99 | 32.83 | 24.78 | |
| I041W | 0.34 | 0.20 | 57.10 | 0.83 | 0.78 | 94.22 | 75.66 | 16.82 | 126 |
| S043N | 0.28 | 0.17 | 60.92 | 0.38 | 0.13 | 32.68 | 46.80 | 28.63 | |
| P044E | 0.27 | 0.00 | 0.00 | 0.28 | 0.00 | 0.00 | 0.00 | 20.11 | |
| R045K | 1.02 | 0.43 | 41.74 | 2.95 | 1.32 | 44.67 | 43.20 | 16.82 | |
| I046A | 1.53 | 0.60 | 39.52 | 3.77 | 1.56 | 41.52 | 40.52 | 16.82 | |
| I046C | 0.42 | 0.18 | 43.10 | 0.81 | 0.28 | 34.99 | 39.04 | 27.59 | |
| I046F | 0.44 | 0.22 | 49.89 | 1.08 | 0.33 | 30.35 | 40.12 | 27.59 | |
| I046H | 0.31 | 0.17 | 54.57 | 0.38 | 0.18 | 47.42 | 51.00 | 27.59 | 120 |
| I046L | 0.49 | 0.23 | 45.55 | 0.90 | 0.35 | 39.25 | 42.40 | 27.59 | |
| I046M | 0.51 | 0.23 | 46.29 | 0.38 | 0.16 | 43.06 | 44.68 | 27.59 | |
| I046N | 0.43 | 0.15 | 34.45 | 0.44 | 0.17 | 39.26 | 36.85 | 35.61 | |
| I046R | 2.80 | 0.72 | 25.78 | 2.78 | 0.62 | 22.36 | 24.07 | 35.61 | |
| I046S | 0.20 | 0.09 | 46.06 | 0.22 | 0.08 | 34.88 | 40.47 | 35.61 | |
| I046T | 0.63 | 0.23 | 35.89 | 0.77 | 0.23 | 29.50 | 32.70 | 35.61 | |
| I046V | 0.84 | 0.04 | 4.23 | 0.95 | 0.03 | 3.49 | 3.86 | 20.11 | |
| I046Y | 1.10 | 0.31 | 28.47 | 1.00 | 0.27 | 26.53 | 27.50 | 35.61 | |
| N047A | 0.40 | 0.16 | 40.05 | 0.41 | 0.12 | 28.33 | 34.19 | 35.61 | |
| N047G | 0.28 | 0.12 | 40.99 | 0.27 | 0.16 | 59.29 | 50.14 | 35.61 | 121 |
| N047H | 0.93 | 0.25 | 27.29 | 0.78 | 0.14 | 17.45 | 22.37 | 16.92 | |
| N047M | 0.77 | 0.24 | 31.37 | 0.62 | 0.16 | 24.98 | 28.18 | 32.61 | |
| N047Q | 0.32 | 0.00 | 0.00 | 0.41 | 0.03 | 7.49 | 3.75 | 16.92 | |
| N047R | 0.40 | 0.27 | 66.54 | 0.52 | 0.23 | 43.94 | 55.24 | 28.04 | 122 |
| N047S | 0.39 | 0.06 | 14.32 | 0.43 | 0.00 | 0.00 | 7.16 | 16.92 | |
| N047T | 0.41 | 0.06 | 15.63 | 0.50 | 0.00 | 0.70 | 8.16 | 16.92 | |
| N047W | 0.58 | 0.17 | 28.93 | 0.46 | 0.12 | 26.89 | 27.91 | 32.61 | |
| N047Y | 0.36 | 0.02 | 5.33 | 0.44 | 0.00 | 0.79 | 3.06 | 16.92 | |
| S215T | 0.76 | 0.49 | 64.96 | 1.08 | 0.48 | 44.12 | 54.54 | 19.93 | 246 |
| A048H | 3.68 | 0.98 | 26.71 | 2.87 | 0.62 | 21.73 | 24.22 | 32.61 | |
| A048I | 2.57 | 0.26 | 9.91 | 2.09 | 0.43 | 20.81 | 15.36 | 16.92 | |
| A048K | 2.02 | 1.00 | 49.21 | 2.32 | 0.87 | 37.69 | 43.45 | 28.04 | |
| A048M | 2.49 | 0.76 | 30.61 | 2.33 | 0.66 | 28.23 | 29.42 | 22.27 | |
| A048N | 9.51 | 2.68 | 28.16 | 6.95 | 1.48 | 21.29 | 24.73 | 32.61 | |
| A048Q | 1.79 | 0.80 | 44.80 | 2.02 | 0.74 | 36.67 | 40.73 | 28.04 | |
| A048R | 3.54 | 1.06 | 29.85 | 3.42 | 0.88 | 25.78 | 27.82 | 22.27 | |
| A048S | 0.95 | 0.36 | 38.28 | 0.86 | 0.30 | 35.49 | 36.89 | 22.27 | |
| A048V | 1.11 | 0.48 | 43.53 | 1.25 | 0.50 | 39.80 | 41.67 | 28.04 | |
| A048Y | 0.56 | 0.34 | 60.30 | 0.77 | 0.31 | 40.39 | 50.35 | 28.04 | 124 |
| T049I | 0.17 | 0.09 | 51.62 | 0.16 | 0.09 | 57.45 | 54.54 | 29.04 | 125 |
| T049K | 1.18 | 0.31 | 26.23 | 1.28 | 0.31 | 24.63 | 25.43 | 29.04 | |
| T049R | 1.84 | 0.45 | 24.61 | 1.80 | 0.40 | 22.21 | 23.41 | 29.04 | |
| T049S | 1.56 | 0.67 | 42.94 | 1.18 | 0.55 | 46.39 | 44.67 | 29.23 | |
| T049V | 0.23 | 0.00 | 0.00 | 0.32 | 0.00 | 0.00 | 0.00 | 20.11 | |
| G050A | 0.52 | 0.19 | 37.20 | 0.50 | 0.20 | 40.40 | 38.80 | 29.04 | |
| G050C | 0.13 | 0.09 | 70.12 | 0.12 | 0.10 | 89.57 | 79.84 | 27.69 | 195 |
| G050D | 0.50 | 0.31 | 61.80 | 0.25 | 0.15 | 61.54 | 61.67 | 27.69 | 364 |
| G050E | 0.79 | 0.38 | 47.38 | 0.58 | 0.25 | 42.65 | 45.01 | 29.04 | |
| G050H | 1.38 | 0.58 | 41.71 | 4.49 | 0.58 | 12.85 | 27.28 | 25.07 | |
| G050L | 0.36 | 0.19 | 53.28 | 0.50 | 0.23 | 45.73 | 49.50 | 27.69 | |
| G050Q | 0.69 | 0.20 | 28.93 | 1.82 | 0.67 | 36.94 | 32.94 | 25.07 | |
| G050R | 0.91 | 0.25 | 27.26 | 2.07 | 0.25 | 11.98 | 19.62 | 25.07 | |
| G050S | 0.15 | 0.01 | 3.41 | 0.22 | 0.04 | 16.67 | 10.04 | 25.07 | |
| G050Y | 0.25 | 0.07 | 30.14 | 0.77 | 0.20 | 25.70 | 27.92 | 25.07 | |
| Q051A | 0.20 | 0.01 | 6.47 | 0.19 | 0.00 | 0.00 | 3.23 | 25.07 | |
| Q051N | 1.09 | 0.06 | 5.51 | 1.02 | 0.00 | 0.00 | 2.76 | 27.17 | |
| G052N | 1.91 | 1.02 | 53.50 | 2.05 | 0.82 | 39.74 | 46.62 | 27.17 | |
| G052Q | 0.83 | 0.33 | 39.65 | 0.64 | 0.20 | 30.33 | 34.99 | 32.61 | |
| G052S | 0.81 | 0.30 | 36.62 | 1.18 | 0.38 | 32.30 | 34.46 | 27.17 | |
| G052T | 0.85 | 0.43 | 50.09 | 1.01 | 0.34 | 33.98 | 42.03 | 27.17 | |
| T054A | 0.50 | 0.06 | 11.64 | 0.61 | 0.02 | 3.96 | 7.80 | 27.17 | |
| T054N | 0.80 | 0.42 | 52.90 | 0.99 | 0.39 | 39.05 | 45.98 | 27.17 | |
| T054Q | 3.82 | 1.60 | 42.01 | 4.61 | 1.50 | 32.54 | 37.27 | 27.17 | |
| T054S | 3.41 | 1.38 | 40.34 | 2.43 | 0.43 | 17.75 | 29.04 | 27.17 | |
| T054V | 1.00 | 0.00 | 0.00 | 0.43 | 0.00 | 0.00 | 0.00 | 11.45 | |
| V058C | 1.17 | 0.12 | 10.58 | 0.43 | 0.00 | 0.00 | 5.29 | 11.45 | |
| V058G | 0.99 | 0.01 | 1.41 | 0.44 | 0.00 | 0.00 | 0.70 | 11.45 | |
| V058H | 2.25 | 0.54 | 24.13 | 1.10 | 0.24 | 21.91 | 23.02 | 11.45 | |
| V058I | 2.45 | 0.29 | 11.65 | 1.68 | 0.20 | 11.75 | 11.70 | 11.45 | |
| S235T | 1.32 | 0.86 | 65.16 | 1.87 | 1.41 | 75.41 | 70.28 | 31.65 | 218 |
| V058L | 2.39 | 0.81 | 33.74 | 1.41 | 0.44 | 31.51 | 32.63 | 11.45 | |
| V058N | 1.28 | 0.46 | 35.75 | 1.23 | 0.40 | 32.51 | 34.13 | 36.38 | |
| V058P | 1.33 | 0.64 | 47.73 | 1.16 | 0.41 | 35.75 | 41.74 | 26.81 | |
| V058Q | 4.89 | 1.88 | 38.39 | 3.99 | 1.41 | 35.39 | 36.89 | 26.81 | |
| F204P | 2.72 | 4.19 | 154.20 | 1.84 | 1.13 | 61.20 | 107.70 | 31.65 | 104 |
| V058S | 1.77 | 0.87 | 49.01 | 1.56 | 0.52 | 33.11 | 41.06 | 26.81 | |
| V058Y | 1.03 | 0.40 | 39.16 | 1.09 | 0.50 | 45.81 | 42.49 | 26.81 | |
| D059N | 2.29 | 0.58 | 25.47 | 2.33 | 0.43 | 18.57 | 22.02 | 26.81 | |
| T147I | 0.63 | 0.52 | 82.89 | 0.56 | 0.48 | 85.17 | 84.03 | 34.46 | 183 |
| Y063H | 1.32 | 0.33 | 25.21 | 1.55 | 0.16 | 10.28 | 17.74 | 0.00 | |
| Y063I | 1.49 | 0.00 | 0.00 | 1.75 | 0.03 | 1.94 | 0.97 | 0.00 | |
| Y063K | 5.75 | 0.23 | 3.95 | 5.31 | 0.01 | 0.14 | 2.04 | 0.00 | |
| Y063L | 1.61 | 0.00 | 0.00 | 2.27 | 0.00 | 0.00 | 0.00 | 17.25 | |
| Y063M | 0.80 | 0.00 | 0.00 | 0.01 | 0.00 | 0.00 | 0.00 | 17.25 | |
| Y063N | 0.57 | 0.18 | 31.27 | 0.72 | 0.21 | 29.59 | 30.43 | 36.38 | |
| Y063R | 2.64 | 0.34 | 12.97 | 3.51 | 0.12 | 3.36 | 8.17 | 17.25 | |
| Y063S | 0.37 | 0.00 | 0.00 | 0.48 | 0.00 | 0.00 | 0.00 | 17.25 | |
| Y063T | 0.64 | 0.00 | 0.00 | 1.17 | 0.00 | 0.00 | 0.00 | 17.25 | |
| Y063W | 1.54 | 0.00 | 0.00 | 1.60 | 0.21 | 12.82 | 6.41 | 17.25 | |
| Y066H | 1.00 | 0.18 | 17.97 | 1.41 | 0.03 | 2.06 | 10.02 | 17.25 | |
| Y066R | 1.72 | 0.19 | 10.98 | 1.24 | 0.03 | 2.21 | 6.59 | 12.63 | |
| I067F | 0.35 | 0.23 | 67.63 | 0.34 | 0.19 | 56.79 | 62.21 | 32.47 | 359 |
| I067V | 2.56 | 0.81 | 31.62 | 2.22 | 0.42 | 19.03 | 25.33 | 12.63 | |
| I067Y | 1.72 | 0.45 | 26.07 | 0.84 | 0.18 | 21.86 | 23.97 | 35.76 | |
| D068E | 1.31 | 0.35 | 26.68 | 1.18 | 0.16 | 13.87 | 20.27 | 12.63 | |
| D068H | 5.10 | 1.31 | 25.69 | 4.62 | 0.89 | 19.34 | 22.52 | 12.63 | |
| D068K | 3.45 | 0.61 | 17.61 | 3.05 | 0.33 | 10.85 | 14.23 | 12.63 | |
| D068Q | 3.87 | 0.51 | 13.20 | 3.52 | 0.57 | 16.24 | 14.72 | 12.63 | |
| D068R | 4.42 | 0.36 | 8.12 | 3.44 | 0.36 | 10.57 | 9.34 | 12.63 | |
| D068S | 0.91 | 0.02 | 2.09 | 0.96 | 0.03 | 3.38 | 2.73 | 22.90 | |
| S069A | 0.34 | 0.25 | 72.79 | 0.31 | 0.27 | 87.16 | 79.98 | 32.47 | 360 |
| S069E | 0.25 | 0.13 | 53.36 | 0.29 | 0.04 | 13.49 | 33.42 | 22.90 | |
| S069G | 0.31 | 0.16 | 49.92 | 0.44 | 0.14 | 31.69 | 40.80 | 22.90 | |
| S069M | 0.78 | 0.43 | 54.28 | 1.01 | 0.36 | 35.79 | 45.03 | 22.90 | |
| S069P | 1.70 | 0.86 | 50.58 | 2.00 | 0.92 | 46.29 | 48.43 | 22.90 | |
| S069R | 3.01 | 1.08 | 35.84 | 3.78 | 0.89 | 23.52 | 29.68 | 22.90 | |
| S069T | 1.34 | 0.47 | 34.85 | 1.28 | 0.52 | 40.14 | 37.50 | 29.23 | |
| S069W | 0.72 | 0.19 | 26.16 | 0.55 | 0.15 | 27.61 | 26.89 | 28.17 | |
| S069Y | 0.42 | 0.30 | 70.83 | 0.46 | 0.27 | 58.14 | 64.49 | 30.17 | 278 |
| I070A | 0.56 | 0.30 | 53.30 | 0.54 | 0.23 | 42.25 | 47.78 | 30.17 | |
| I070C | 0.96 | 0.50 | 52.58 | 1.12 | 0.30 | 27.03 | 39.81 | 30.17 | |
| I070F | 1.78 | 0.66 | 36.90 | 1.43 | 0.59 | 41.42 | 39.16 | 30.17 | |
| I070H | 2.66 | 0.91 | 33.99 | 1.81 | 0.56 | 30.70 | 32.35 | 30.17 | |
| I070K | 0.66 | 0.23 | 34.62 | 0.42 | 0.26 | 61.16 | 47.89 | 30.17 | |
| I070L | 0.81 | 0.13 | 16.03 | 0.72 | 0.16 | 21.77 | 18.90 | 30.17 | |
| I070N | 0.88 | 0.28 | 32.02 | 0.97 | 0.39 | 39.63 | 35.83 | 30.17 | |
| I070P | 0.29 | 0.00 | 0.00 | 0.21 | 0.00 | 0.00 | 0.00 | 5.42 | |
| I070R | 2.38 | 0.52 | 21.99 | 2.18 | 0.49 | 22.44 | 22.22 | 35.76 | |
| I070S | 1.54 | 0.34 | 22.27 | 1.58 | 0.30 | 19.23 | 20.75 | 35.76 | |
| I070T | 0.28 | 0.00 | 0.00 | 0.27 | 0.00 | 0.00 | 0.00 | 5.42 | |
| I070V | 1.21 | 0.29 | 23.82 | 1.07 | 0.30 | 27.65 | 25.73 | 35.76 | |
| T071A | 0.24 | 0.00 | 0.00 | 0.46 | 0.00 | 0.00 | 0.00 | 5.42 | |
| T071G | 0.50 | 0.00 | 0.00 | 0.67 | 0.00 | 0.00 | 0.00 | 20.11 | |
| T071N | 1.03 | 0.22 | 21.55 | 0.90 | 0.18 | 19.92 | 20.74 | 35.76 | |
| T071R | 1.29 | 0.18 | 14.10 | 1.25 | 0.01 | 0.68 | 7.39 | 5.42 | |
| T071S | 1.19 | 0.35 | 29.52 | 1.05 | 0.20 | 19.52 | 24.52 | 5.42 | |
| G072A | 0.89 | 0.17 | 19.10 | 0.87 | 0.15 | 17.17 | 18.13 | 28.16 | |
| G072D | 3.07 | 2.61 | 84.94 | 2.54 | 0.74 | 29.27 | 57.11 | 32.61 | 133 |
| G072H | 0.75 | 0.21 | 27.64 | 0.72 | 0.20 | 28.37 | 28.01 | 29.23 | |
| G072K | 0.62 | 0.13 | 20.99 | 0.64 | 0.13 | 19.94 | 20.46 | 28.16 | |
| G072Q | 0.59 | 0.00 | 0.00 | 0.84 | 0.00 | 0.00 | 0.00 | 20.11 | |
| G072R | 1.26 | 0.22 | 17.67 | 1.71 | 0.24 | 14.17 | 15.92 | 28.16 | |
| G072S | 0.67 | 0.16 | 24.02 | 0.98 | 0.18 | 18.83 | 21.43 | 28.16 | |
| V073A | 0.75 | 0.26 | 35.00 | 0.63 | 0.24 | 38.50 | 36.75 | 5.42 | |
| V073D | 1.74 | 0.81 | 46.42 | 1.92 | 0.65 | 33.59 | 40.01 | 5.42 | |
| V073G | 0.49 | 0.13 | 26.62 | 0.61 | 0.05 | 8.72 | 17.67 | 24.32 | |
| V073H | 0.99 | 0.27 | 27.22 | 0.62 | 0.34 | 53.90 | 40.56 | 24.32 | |
| V073M | 1.69 | 0.59 | 35.03 | 1.87 | 0.54 | 28.82 | 31.92 | 24.32 | |
| V073Q | 0.86 | 0.44 | 51.57 | 1.01 | 0.40 | 39.11 | 45.34 | 24.32 | |
| V073S | 1.85 | 0.75 | 40.53 | 1.84 | 0.52 | 28.05 | 34.29 | 24.32 | |
| V073T | 0.44 | 0.26 | 58.68 | 0.55 | 0.26 | 47.04 | 52.86 | 24.32 | 134 |
| V073W | 1.55 | 0.69 | 44.69 | 1.92 | 0.75 | 38.98 | 41.84 | 24.32 | |
| T074C | 1.42 | 0.78 | 55.12 | 1.84 | 0.69 | 37.65 | 46.39 | 24.32 | |
| T074F | 1.23 | 0.38 | 31.06 | 1.55 | 0.65 | 41.58 | 36.32 | 28.96 | |
| T074H | 0.94 | 0.11 | 12.21 | 0.87 | 0.40 | 45.79 | 29.00 | 28.96 | |
| T074K | 1.54 | 0.21 | 13.77 | 1.94 | 0.30 | 15.53 | 14.65 | 28.96 | |
| T074M | 1.98 | 0.49 | 24.84 | 2.07 | 0.50 | 24.01 | 24.43 | 29.23 | |
| T074N | 1.78 | 0.51 | 28.40 | 2.06 | 0.64 | 30.85 | 29.62 | 28.96 | |
| T074P | 2.66 | 0.90 | 33.89 | 2.69 | 1.07 | 39.62 | 36.76 | 28.96 | |
| T074R | 0.54 | 0.05 | 9.92 | 0.56 | 0.03 | 5.99 | 7.96 | 28.96 | |
| T074V | 2.02 | 0.73 | 36.30 | 2.42 | 0.88 | 36.34 | 36.32 | 28.96 | |
| T074W | 0.23 | 0.10 | 42.24 | 0.22 | 0.10 | 43.71 | 42.97 | 35.91 | |
| V075A | 0.41 | 0.16 | 37.74 | 0.52 | 0.20 | 38.34 | 38.04 | 27.69 | |
| V075F | 0.84 | 0.34 | 40.34 | 1.02 | 0.39 | 38.28 | 39.31 | 27.69 | |
| V075N | 1.69 | 0.52 | 30.58 | 1.19 | 0.28 | 23.43 | 27.01 | 35.91 | |
| V075Q | 2.73 | 0.76 | 27.68 | 2.60 | 0.87 | 33.44 | 30.56 | 31.00 | |
| V075R | 1.12 | 0.39 | 34.77 | 1.31 | 0.45 | 34.11 | 34.44 | 27.69 | |
| V075S | 0.30 | 0.03 | 9.26 | 0.28 | 0.01 | 5.02 | 7.14 | 34.21 | |
| V075T | 0.52 | 0.15 | 29.29 | 0.83 | 0.25 | 30.35 | 29.82 | 27.69 | |
| V075Y | 2.11 | 0.63 | 29.72 | 1.87 | 0.55 | 29.61 | 29.67 | 29.23 | |
| I079L | 0.54 | 0.17 | 30.63 | 0.57 | 0.20 | 34.74 | 32.68 | 34.21 | |
| I079V | 0.32 | 0.09 | 28.71 | 0.28 | 0.08 | 29.36 | 29.03 | 34.21 | |
| K082A | 1.17 | 0.49 | 41.98 | 1.05 | 0.32 | 30.67 | 36.33 | 25.91 | |
| K082E | 0.37 | 0.08 | 21.82 | 0.34 | 0.05 | 14.14 | 17.98 | 34.21 | |
| K082G | 0.19 | 0.06 | 31.82 | 0.20 | 0.04 | 19.18 | 25.50 | 33.36 | |
| K082H | 0.66 | 0.21 | 31.11 | 0.60 | 0.15 | 24.27 | 27.69 | 25.91 | |
| K082L | 0.61 | 0.14 | 23.14 | 0.62 | 0.13 | 21.39 | 22.26 | 33.36 | |
| K082M | 1.12 | 0.34 | 30.45 | 1.17 | 0.33 | 28.30 | 29.37 | 31.71 | |
| K082N | 0.23 | 0.07 | 32.75 | 0.17 | 0.06 | 35.21 | 33.98 | 33.36 | |
| K082Q | 0.74 | 0.19 | 25.44 | 0.68 | 0.17 | 25.28 | 25.36 | 33.36 | |
| K082R | 2.33 | 0.57 | 24.49 | 2.26 | 0.57 | 25.08 | 24.78 | 29.23 | |
| K082S | 0.82 | 0.32 | 38.34 | 0.73 | 0.24 | 33.38 | 35.86 | 25.91 | |
| K082T | 1.17 | 0.22 | 19.13 | 1.04 | 0.17 | 16.31 | 17.72 | 31.71 | |
| K082V | 0.64 | 0.23 | 35.30 | 0.48 | 0.20 | 41.59 | 38.44 | 25.91 | |
| K082Y | 0.75 | 0.19 | 25.27 | 0.86 | 0.20 | 23.17 | 24.22 | 31.00 | |
| I083F | 0.81 | 0.08 | 9.99 | 0.98 | 0.03 | 2.91 | 6.45 | 31.71 | |
| I083G | 1.27 | 0.66 | 51.49 | 1.09 | 0.54 | 49.77 | 50.63 | 25.91 | 135 |
| I083H | 0.42 | 0.18 | 43.61 | 0.35 | 0.13 | 36.05 | 39.83 | 25.91 | |
| I083L | 0.80 | 0.11 | 13.88 | 0.88 | 0.10 | 10.83 | 12.35 | 31.71 | |
| I083N | 0.98 | 0.25 | 25.88 | 0.84 | 0.24 | 27.89 | 26.89 | 25.91 | |
| I083Q | 0.29 | 0.22 | 76.55 | 0.32 | 0.19 | 58.80 | 67.67 | 37.07 | 258 |
| I083S | 1.01 | 0.29 | 28.51 | 1.09 | 0.24 | 21.88 | 25.19 | 37.33 | |
| I083T | 1.23 | 0.45 | 36.37 | 0.91 | 0.35 | 38.49 | 37.43 | 25.91 | |
| I083V | 1.65 | 0.87 | 52.90 | 1.63 | 0.78 | 47.98 | 50.44 | 33.02 | 137 |
| S084D | 0.41 | 0.29 | 70.81 | 0.39 | 0.24 | 60.81 | 65.81 | 37.07 | 257 |
| S084E | 0.51 | 0.20 | 38.19 | 0.52 | 0.21 | 40.82 | 39.51 | 33.02 | |
| S084F | 0.43 | 0.18 | 41.95 | 0.44 | 0.16 | 35.63 | 38.79 | 33.02 | |
| S084G | 0.22 | 0.06 | 28.77 | 0.23 | 0.03 | 13.92 | 21.34 | 31.63 | |
| S084H | 0.76 | 0.25 | 32.87 | 0.81 | 0.26 | 31.49 | 32.18 | 33.02 | |
| S084I | 0.75 | 0.26 | 34.67 | 0.79 | 0.21 | 26.07 | 30.37 | 33.02 | |
| S084L | 0.47 | 0.10 | 22.02 | 0.55 | 0.09 | 17.23 | 19.63 | 37.33 | |
| S084N | 1.46 | 0.48 | 32.65 | 1.60 | 0.52 | 32.37 | 32.51 | 31.63 | |
| S084Q | 0.88 | 0.27 | 31.09 | 0.80 | 0.28 | 34.69 | 32.89 | 33.02 | |
| S084R | 0.81 | 0.31 | 37.68 | 0.67 | 0.23 | 34.05 | 35.87 | 31.63 | |
| S084T | 0.65 | 0.16 | 24.16 | 0.78 | 0.12 | 15.64 | 19.90 | 37.33 | |
| S084W | 0.53 | 0.15 | 28.80 | 0.50 | 0.15 | 29.45 | 29.12 | 28.17 | |
| Q086A | 2.54 | 0.90 | 35.51 | 2.04 | 0.63 | 30.64 | 33.08 | 31.00 | |
| Q086D | 2.46 | 2.22 | 90.11 | 1.46 | 0.77 | 52.87 | 71.49 | 32.02 | 206 |
| Q086E | 0.21 | 0.21 | 99.52 | 0.55 | 0.29 | 53.09 | 76.30 | 26.52 | 345 |
| Q086F | 1.86 | 0.49 | 26.14 | 1.60 | 0.43 | 26.84 | 26.49 | 31.00 | |
| Q086G | 0.19 | 0.08 | 38.92 | 0.29 | 0.11 | 40.18 | 39.55 | 22.03 | |
| Q086H | 0.85 | 0.26 | 30.12 | 1.18 | 0.35 | 29.84 | 29.98 | 22.03 | |
| Q086I | 1.99 | 0.59 | 29.41 | 2.60 | 0.58 | 22.36 | 25.89 | 31.00 | |
| Q086K | 0.31 | 0.10 | 30.98 | 0.43 | 0.18 | 41.76 | 36.37 | 32.02 | |
| Q086L | 1.03 | 0.28 | 27.16 | 1.27 | 0.35 | 27.31 | 27.23 | 22.03 | |
| Q086M | 0.60 | 0.20 | 33.78 | 0.48 | 0.10 | 20.21 | 26.99 | 32.02 | |
| Q086N | 1.13 | 0.40 | 35.11 | 0.50 | 0.39 | 76.92 | 56.01 | 32.02 | 141 |
| Q086P | 2.18 | 0.59 | 26.89 | 2.01 | 0.57 | 28.19 | 27.54 | 29.23 | |
| Q086R | 0.66 | 0.32 | 47.84 | 0.66 | 1.03 | 155.95 | 101.90 | 12.70 | 114 |
| Q086S | 1.84 | 0.61 | 33.00 | 3.21 | 1.65 | 51.32 | 42.16 | 12.70 | |
| Q086T | 2.91 | 0.78 | 26.76 | 2.12 | 0.64 | 30.26 | 28.51 | 31.00 | |
| Q086V | 0.53 | 0.09 | 16.65 | 0.55 | 0.34 | 62.16 | 39.40 | 12.70 | |
| Q086W | 0.68 | 0.20 | 29.26 | 0.97 | 0.23 | 23.63 | 26.44 | 22.03 | |
| D087A | 0.18 | 0.01 | 5.72 | 0.46 | 0.14 | 31.27 | 18.50 | 23.18 | |
| D087E | 1.18 | 0.39 | 32.57 | 1.24 | 0.35 | 28.50 | 30.54 | 33.02 | |
| D087G | 1.17 | 0.46 | 39.13 | 1.23 | 0.44 | 36.09 | 37.61 | 36.72 | |
| D087H | 0.32 | 0.08 | 24.81 | 0.82 | 0.34 | 41.94 | 33.37 | 38.36 | |
| D087I | 0.40 | 0.14 | 34.43 | 0.41 | 0.13 | 30.42 | 32.43 | 37.91 | |
| D087M | 0.76 | 0.49 | 64.46 | 0.91 | 0.37 | 41.09 | 52.77 | 36.72 | 143 |
| D087P | 1.10 | 0.36 | 32.74 | 1.15 | 1.22 | 106.23 | 69.49 | 37.00 | 224 |
| D087Q | 1.02 | 0.54 | 53.07 | 1.17 | 0.48 | 40.72 | 46.90 | 36.72 | |
| D087R | 1.12 | 0.57 | 50.74 | 1.05 | 0.48 | 46.21 | 48.47 | 36.72 | |
| D087S | 1.61 | 0.79 | 49.22 | 1.09 | 0.44 | 40.69 | 44.96 | 39.71 | |
| D087T | 0.47 | 0.13 | 27.83 | 0.88 | 0.18 | 20.27 | 24.05 | 37.33 | |
| D087V | 0.46 | 0.26 | 56.64 | 0.52 | 0.24 | 45.87 | 51.26 | 36.72 | 145 |
| D090A | 1.20 | 0.54 | 45.08 | 0.91 | 0.41 | 45.39 | 45.23 | 36.72 | |
| D090E | 0.35 | 0.22 | 64.31 | 0.29 | 0.13 | 44.82 | 54.56 | 39.71 | 146 |
| D090H | 0.91 | 0.47 | 51.23 | 0.85 | 0.37 | 43.58 | 47.41 | 36.72 | |
| D090I | 1.31 | 0.63 | 47.94 | 1.22 | 0.57 | 46.58 | 47.26 | 36.72 | |
| D090K | 1.63 | 0.56 | 34.08 | 1.85 | 0.55 | 29.70 | 31.89 | 26.56 | |
| D090L | 0.53 | 0.21 | 40.40 | 0.51 | 0.19 | 37.50 | 38.95 | 37.65 | |
| D090N | 1.42 | 0.47 | 32.77 | 1.87 | 0.51 | 27.17 | 29.97 | 41.91 | |
| D090Q | 0.74 | 0.28 | 37.40 | 0.91 | 0.26 | 28.54 | 32.97 | 41.91 | |
| D090R | 0.26 | 0.14 | 52.51 | 0.29 | 0.11 | 38.32 | 45.41 | 41.91 | |
| D090S | 0.80 | 0.28 | 34.82 | 0.76 | 0.27 | 36.02 | 35.42 | 26.56 | |
| D090T | 0.11 | 0.08 | 69.74 | 0.18 | 0.09 | 50.14 | 59.94 | 41.91 | 147 |
| D090W | 2.20 | 2.61 | 118.77 | 1.84 | 3.28 | 178.03 | 148.40 | 33.22 | 89 |
| K091A | 0.57 | 0.19 | 33.33 | 0.53 | 0.20 | 37.43 | 35.38 | 33.22 | |
| K091Q | 0.53 | 0.18 | 34.05 | 0.52 | 0.19 | 35.73 | 34.89 | 33.22 | |
| K091R | 0.88 | 0.22 | 25.40 | 0.85 | 0.21 | 24.44 | 24.92 | 33.22 | |
| A092C | 0.78 | 0.16 | 20.98 | 0.67 | 0.16 | 23.24 | 22.11 | 33.22 | |
| A092M | 0.49 | 0.14 | 27.64 | 0.53 | 0.12 | 22.88 | 25.26 | 33.22 | |
| A092T | 0.83 | 0.25 | 29.52 | 0.90 | 0.19 | 20.61 | 25.07 | 33.22 | |
| A092V | 0.42 | 0.37 | 89.68 | 1.01 | 0.33 | 32.69 | 61.18 | 33.22 | 376 |
| K093E | 1.39 | 0.53 | 37.74 | 1.58 | 2.86 | 180.18 | 108.96 | 35.80 | 102 |
| K093F | 0.91 | 0.16 | 17.65 | 0.94 | 0.17 | 17.84 | 17.75 | 31.71 | |
| K093G | 0.81 | 0.13 | 16.31 | 1.18 | 0.61 | 52.02 | 34.16 | 35.80 | |
| K093I | 0.78 | 0.22 | 27.84 | 1.76 | 0.65 | 37.11 | 32.48 | 35.80 | |
| K093M | 1.17 | 0.32 | 27.57 | 3.10 | 1.07 | 34.38 | 30.97 | 35.80 | |
| K093N | 0.97 | 0.27 | 27.31 | 2.35 | 0.76 | 32.43 | 29.87 | 35.80 | |
| K093Q | 1.05 | 0.31 | 29.24 | 2.98 | 0.99 | 33.07 | 31.15 | 35.80 | |
| K093R | 0.36 | 0.15 | 41.96 | 0.94 | 0.41 | 43.07 | 42.51 | 35.80 | |
| K093S | 1.84 | 3.73 | 202.14 | 1.14 | 1.91 | 167.19 | 184.67 | 8.44 | 78 |
| K093T | 2.37 | 0.83 | 34.77 | 1.86 | 0.47 | 25.14 | 29.95 | 8.44 | |
| K093V | 1.01 | 0.36 | 35.54 | 1.42 | 0.56 | 39.08 | 37.31 | 37.00 | |
| K094A | 2.24 | 0.65 | 29.07 | 1.37 | 0.36 | 26.11 | 27.59 | 8.44 | |
| K094D | 1.84 | 0.58 | 31.44 | 1.40 | 0.41 | 29.37 | 30.41 | 8.44 | |
| K094E | 1.89 | 0.61 | 32.00 | 1.11 | 0.34 | 30.07 | 31.04 | 8.44 | |
| K094F | 0.66 | 0.19 | 29.38 | 0.36 | 0.11 | 29.99 | 29.68 | 8.44 | |
| K094H | 0.38 | 0.16 | 42.50 | 0.22 | 0.09 | 38.43 | 40.46 | 8.44 | |
| K094M | 1.53 | 0.59 | 38.79 | 0.89 | 0.26 | 28.94 | 33.86 | 8.44 | |
| K094N | 0.24 | 0.09 | 36.57 | 0.22 | 0.20 | 91.38 | 63.98 | 11.35 | 335 |
| K094Q | 0.82 | 0.23 | 28.18 | 0.67 | 0.20 | 29.10 | 28.64 | 11.35 | |
| K094R | 0.56 | 0.16 | 28.39 | 0.52 | 0.16 | 29.94 | 29.17 | 11.35 | |
| K094S | 0.94 | 0.25 | 26.05 | 0.80 | 0.18 | 22.89 | 24.47 | 11.35 | |
| K094T | 0.20 | 0.06 | 31.84 | 0.15 | 0.04 | 27.91 | 29.87 | 11.35 | |
| I096L | 0.26 | 0.06 | 24.39 | 0.23 | 0.04 | 19.47 | 21.93 | 11.35 | |
| T097C | 0.34 | 0.15 | 44.08 | 0.47 | 0.18 | 37.99 | 41.04 | 28.16 | |
| T097D | 1.26 | 0.39 | 31.06 | 1.57 | 0.45 | 28.39 | 29.73 | 28.16 | |
| T097E | 0.86 | 0.40 | 46.23 | 0.54 | 0.35 | 65.18 | 55.70 | 33.76 | 153 |
| T097F | 1.15 | 1.49 | 129.56 | 2.98 | 1.32 | 44.38 | 86.97 | 28.16 | 165 |
| T097G | 2.03 | 0.68 | 33.52 | 4.72 | 2.75 | 58.21 | 45.87 | 15.00 | |
| T097I | 1.12 | 0.41 | 36.27 | 1.86 | 0.92 | 49.57 | 42.92 | 15.00 | |
| T097L | 2.18 | 0.81 | 37.02 | 3.14 | 1.43 | 45.73 | 41.37 | 15.00 | |
| T097N | 3.09 | 0.89 | 28.89 | 4.81 | 1.68 | 34.96 | 31.93 | 15.00 | |
| T097Q | 3.01 | 0.82 | 27.16 | 4.61 | 1.78 | 38.68 | 32.92 | 15.00 | |
| T097S | 2.12 | 0.60 | 28.12 | 3.06 | 0.95 | 31.11 | 29.61 | 15.00 | |
| T097Y | 1.33 | 0.42 | 31.56 | 2.16 | 0.85 | 39.08 | 35.32 | 15.00 | |
| F098H | 4.75 | 2.10 | 44.17 | 2.63 | 0.80 | 30.38 | 37.27 | 29.98 | |
| F098I | 0.89 | 0.28 | 31.48 | 0.70 | 0.14 | 19.60 | 25.54 | 29.98 | |
| F098L | 1.17 | 0.41 | 34.80 | 0.87 | 0.18 | 20.35 | 27.58 | 29.98 | |
| F098M | 5.47 | 3.34 | 61.03 | 3.84 | 2.53 | 65.85 | 63.44 | 29.23 | 295 |
| F098R | 2.09 | 0.55 | 26.07 | 2.64 | 0.82 | 30.89 | 28.48 | 37.00 | |
| F098S | 0.37 | 0.22 | 58.22 | 0.33 | 0.09 | 27.60 | 42.91 | 29.98 | |
| F098W | 1.01 | 0.16 | 16.09 | 0.89 | 0.17 | 19.17 | 17.63 | 4.17 | |
| Y099R | 0.85 | 0.22 | 25.25 | 0.85 | 0.58 | 68.37 | 46.81 | 24.78 | |
| Y099S | 0.23 | 0.18 | 79.18 | 0.23 | 0.16 | 69.98 | 74.58 | 37.23 | 225 |
| V102E | 2.73 | 0.94 | 34.44 | 2.15 | 0.58 | 26.77 | 30.60 | 29.98 | |
| T306D | 0.24 | 0.11 | 45.96 | 0.30 | 0.30 | 102.19 | 74.08 | 32.76 | 256 |
| V102K | 4.11 | 1.32 | 32.00 | 2.56 | 0.86 | 33.63 | 32.82 | 29.98 | |
| V102N | 7.15 | 4.61 | 64.52 | 5.59 | 2.67 | 47.82 | 56.17 | 29.98 | 158 |
| V102Q | 2.33 | 0.85 | 36.62 | 2.58 | 0.76 | 29.41 | 33.02 | 37.65 | |
| V102R | 2.30 | 0.61 | 26.68 | 2.17 | 0.47 | 21.74 | 24.21 | 37.65 | |
| V102S | 1.33 | 0.43 | 32.13 | 1.28 | 0.30 | 23.46 | 27.80 | 37.65 | |
| V102W | 1.32 | 0.44 | 33.02 | 1.62 | 0.57 | 35.17 | 34.09 | 37.00 | |
| N104A | 1.22 | 0.51 | 41.59 | 1.31 | 0.54 | 41.62 | 41.60 | 21.42 | |
| N104G | 0.34 | 0.07 | 20.79 | 1.05 | 0.42 | 39.64 | 30.21 | 37.00 | |
| N104K | 1.22 | 0.41 | 33.51 | 1.27 | 0.34 | 27.15 | 30.33 | 37.65 | |
| N104R | 1.09 | 0.38 | 34.68 | 1.02 | 0.25 | 24.02 | 29.35 | 37.65 | |
| N104T | 0.73 | 0.19 | 26.45 | 2.24 | 0.94 | 41.97 | 34.21 | 37.00 | |
| L105G | 0.46 | 0.18 | 39.04 | 0.56 | 0.21 | 37.79 | 38.41 | 37.23 | |
| L105I | 0.32 | 0.16 | 50.47 | 0.48 | 0.31 | 65.06 | 57.77 | 24.78 | 159 |
| L105Q | 0.17 | 0.09 | 55.29 | 0.21 | 0.06 | 28.19 | 41.74 | 37.65 | |
| L105R | 2.36 | 0.69 | 29.28 | 3.76 | 3.17 | 84.29 | 56.78 | 24.78 | 160 |
| L105W | 0.20 | 0.07 | 33.82 | 0.19 | 0.13 | 67.99 | 50.91 | 24.78 | 161 |
| M107F | 0.91 | 0.36 | 39.84 | 0.99 | 0.40 | 40.67 | 40.25 | 21.42 | |
| I110V | 0.72 | 0.25 | 34.15 | 0.73 | 0.25 | 33.38 | 33.76 | 31.87 | |
| E114G | 0.17 | 0.10 | 60.84 | 0.12 | 0.09 | 73.82 | 67.33 | 37.02 | 280 |
| T118L | 1.08 | 0.28 | 26.30 | 1.04 | 0.24 | 23.24 | 24.77 | 21.42 | |
| T118M | 0.17 | 0.09 | 54.76 | 0.11 | 0.09 | 77.78 | 66.27 | 37.02 | 281 |
| A120H | 1.41 | 0.38 | 26.68 | 1.10 | 0.30 | 27.67 | 27.17 | 31.87 | |
| A120I | 1.77 | 0.34 | 19.51 | 1.58 | 0.31 | 19.32 | 19.42 | 31.87 | |
| A120L | 0.35 | 0.08 | 23.82 | 0.86 | 0.11 | 13.32 | 18.57 | 37.33 | |
| A120R | 1.05 | 0.16 | 15.31 | 1.16 | 0.17 | 14.87 | 15.09 | 31.87 | |
| A120S | 0.16 | 0.17 | 108.54 | 0.23 | 0.15 | 65.86 | 87.20 | 21.42 | 297 |
| A120W | 0.90 | 0.17 | 18.32 | 0.96 | 0.14 | 14.54 | 16.43 | 27.61 | |
| A120Y | 0.24 | 0.16 | 66.25 | 0.33 | 0.10 | 29.88 | 48.06 | 27.61 | |
| K124R | 1.15 | 0.36 | 31.70 | 1.07 | 0.27 | 25.59 | 28.64 | 27.61 | |
| D127A | 0.75 | 0.11 | 14.13 | 0.70 | 0.07 | 10.20 | 12.17 | 39.93 | |
| D127E | 1.55 | 0.28 | 18.04 | 1.43 | 0.25 | 17.50 | 17.77 | 27.61 | |
| D127G | 0.91 | 0.15 | 16.53 | 1.31 | 0.19 | 14.25 | 15.39 | 27.61 | |
| D127H | 1.95 | 0.28 | 14.54 | 1.74 | 0.24 | 13.63 | 14.08 | 27.61 | |
| D127L | 0.83 | 0.11 | 13.12 | 1.12 | 0.15 | 13.20 | 13.16 | 37.02 | |
| D127M | 0.74 | 0.11 | 14.92 | 1.04 | 0.13 | 12.74 | 13.83 | 37.02 | |
| D127N | 2.89 | 0.29 | 10.04 | 2.47 | 0.23 | 9.12 | 9.58 | 27.61 | |
| D127Q | 1.91 | 0.12 | 6.19 | 2.18 | 0.15 | 6.98 | 6.59 | 30.27 | |
| D127S | 1.65 | 0.18 | 11.11 | 1.27 | 0.12 | 9.77 | 10.44 | 39.93 | |
| D127T | 3.14 | 0.19 | 5.95 | 3.52 | 0.20 | 5.82 | 5.88 | 30.27 | |
| D127W | 0.73 | 0.06 | 8.01 | 0.32 | 0.04 | 11.36 | 9.69 | 39.93 | |
| V128G | 1.01 | 0.10 | 9.39 | 1.04 | 0.09 | 8.59 | 8.99 | 30.27 | |
| V128I | 1.60 | 0.42 | 26.53 | 1.72 | 0.45 | 26.16 | 26.34 | 30.27 | |
| V128K | 1.87 | 0.15 | 7.85 | 1.91 | 0.14 | 7.53 | 7.69 | 30.27 | |
| V128Q | 0.90 | 0.09 | 10.40 | 0.92 | 0.06 | 6.64 | 8.52 | 30.27 | |
| V128S | 1.08 | 0.10 | 9.62 | 1.14 | 0.10 | 8.89 | 9.25 | 30.27 | |
| V128W | 1.34 | 0.15 | 11.23 | 2.19 | 0.36 | 16.54 | 13.89 | 30.27 | |
| N131C | 0.80 | 0.35 | 43.44 | 2.04 | 1.64 | 80.51 | 61.98 | 31.39 | 352 |
| N131G | 0.97 | 0.16 | 16.32 | 1.12 | 0.17 | 15.04 | 15.68 | 37.02 | |
| N131H | 1.95 | 0.65 | 33.37 | 3.04 | 1.36 | 44.90 | 39.13 | 31.39 | |
| N131I | 0.12 | 0.08 | 65.69 | 0.21 | 0.06 | 27.47 | 46.58 | 37.33 | |
| N131L | 0.23 | 0.19 | 82.09 | 0.25 | 0.22 | 87.82 | 84.95 | 31.39 | 207 |
| N131M | 0.96 | 0.35 | 36.43 | 1.68 | 0.65 | 38.56 | 37.50 | 31.39 | |
| N131Q | 3.58 | 1.34 | 37.49 | 3.84 | 0.86 | 22.47 | 29.98 | 37.02 | |
| N131R | 1.82 | 0.66 | 36.38 | 2.48 | 1.23 | 49.78 | 43.08 | 31.39 | |
| N131S | 0.61 | 0.25 | 41.42 | 0.74 | 0.30 | 39.84 | 40.63 | 31.39 | |
| N131T | 1.39 | 0.57 | 41.47 | 2.31 | 0.99 | 42.78 | 42.12 | 31.39 | |
| N131V | 0.93 | 0.30 | 31.57 | 1.26 | 0.29 | 22.68 | 27.13 | 37.02 | |
| N131Y | 3.65 | 0.91 | 24.85 | 2.40 | 0.34 | 14.34 | 19.59 | 34.80 | |
| R132A | 0.32 | 0.32 | 100.00 | 0.36 | 0.36 | 100.00 | 100.00 | 21.42 | 299 |
| R132C | 0.24 | 0.12 | 50.10 | 0.34 | 0.17 | 51.48 | 50.79 | 21.42 | 168 |
| R132F | 0.66 | 0.17 | 25.77 | 0.46 | 0.10 | 20.54 | 23.16 | 34.80 | |
| R132K | 2.16 | 0.77 | 35.84 | 1.23 | 0.27 | 22.04 | 28.94 | 34.80 | |
| R132Q | 1.19 | 0.29 | 24.45 | 1.14 | 0.27 | 23.30 | 23.88 | 21.42 | |
| R132V | 1.69 | 0.44 | 26.09 | 0.92 | 0.17 | 18.12 | 22.11 | 34.80 | |
| I134L | 0.71 | 0.22 | 31.43 | 0.65 | 0.15 | 22.48 | 26.96 | 39.93 | |
| I134T | 2.01 | 0.26 | 12.93 | 1.16 | 0.06 | 4.89 | 8.91 | 34.80 | |
| E135A | 4.14 | 1.11 | 26.81 | 4.34 | 1.16 | 26.78 | 26.79 | 30.48 | |
| E135C | 0.24 | 0.08 | 35.02 | 0.61 | 0.11 | 17.26 | 26.14 | 37.33 | |
| E135K | 0.22 | 0.08 | 33.41 | 0.18 | 0.06 | 33.52 | 33.46 | 30.48 | |
| E135L | 0.71 | 0.14 | 20.10 | 0.64 | 0.15 | 24.06 | 22.08 | 30.48 | |
| E135N | 0.46 | 0.12 | 25.27 | 0.46 | 0.09 | 19.09 | 22.18 | 30.48 | |
| E135Q | 0.27 | 0.22 | 83.93 | 0.98 | 0.28 | 29.12 | 56.52 | 26.52 | 169 |
| E135R | 1.18 | 0.12 | 10.05 | 1.19 | 0.10 | 8.00 | 9.02 | 30.48 | |
| E135S | 0.23 | 0.07 | 32.53 | 0.20 | 0.06 | 31.25 | 31.89 | 30.48 | |
| L136A | 3.46 | 1.33 | 38.57 | 1.84 | 0.42 | 22.51 | 30.54 | 31.71 | |
| L136C | 1.68 | 0.37 | 21.91 | 1.81 | 0.37 | 20.40 | 21.15 | 25.22 | |
| L136H | 2.32 | 0.73 | 31.30 | 2.61 | 0.79 | 30.22 | 30.76 | 21.42 | |
| L136M | 1.33 | 0.40 | 30.04 | 1.23 | 0.33 | 26.97 | 28.50 | 25.22 | |
| L136Q | 0.38 | 0.13 | 33.38 | 0.24 | 0.05 | 20.08 | 26.73 | 39.93 | |
| L136T | 0.46 | 0.18 | 38.97 | 0.38 | 0.14 | 37.35 | 38.16 | 25.22 | |
| V137A | 0.92 | 0.23 | 24.58 | 0.75 | 0.22 | 28.74 | 26.66 | 25.22 | |
| V137C | 2.32 | 0.44 | 19.16 | 1.81 | 0.32 | 17.62 | 18.39 | 31.00 | |
| V137L | 0.70 | 0.18 | 25.16 | 0.90 | 0.24 | 26.11 | 25.63 | 24.78 | |
| V137S | 0.23 | 0.08 | 34.06 | 0.24 | 0.08 | 31.08 | 32.57 | 25.22 | |
| V137T | 2.36 | 0.76 | 32.29 | 1.83 | 0.35 | 18.93 | 25.61 | 25.22 | |
| Q138A | 0.25 | 0.04 | 16.57 | 0.30 | 0.04 | 14.36 | 15.46 | 27.67 | |
| Q138C | 0.25 | 0.12 | 50.00 | 0.24 | 0.10 | 41.53 | 45.76 | 30.53 | |
| Q138I | 0.82 | 0.22 | 26.78 | 0.81 | 0.16 | 20.14 | 23.46 | 27.67 | |
| Q138L | 0.27 | 0.11 | 41.48 | 0.24 | 0.07 | 30.11 | 35.79 | 27.67 | |
| Q138M | 0.47 | 0.16 | 34.89 | 0.59 | 0.25 | 43.06 | 38.98 | 24.78 | |
| Q138R | 0.60 | 0.20 | 34.11 | 0.54 | 0.11 | 20.17 | 27.14 | 27.67 | |
| Q138S | 0.16 | 0.05 | 30.22 | 0.19 | 0.00 | 0.00 | 15.11 | 27.67 | |
| Q138W | 0.20 | 0.13 | 64.74 | 0.25 | 0.19 | 78.57 | 71.65 | 29.57 | 333 |
| Q138Y | 0.61 | 0.11 | 17.86 | 0.83 | 0.53 | 63.72 | 40.79 | 32.16 | |
| Q139A | 0.82 | 0.09 | 10.87 | 0.82 | 0.11 | 13.31 | 12.09 | 31.59 | |
| Q139C | 0.96 | 0.11 | 11.56 | 1.04 | 0.31 | 30.25 | 20.90 | 29.59 | |
| Q139D | 0.92 | 0.00 | 0.00 | 1.05 | 0.03 | 2.44 | 1.22 | 29.59 | |
| Q139E | 0.72 | 0.11 | 15.21 | 0.79 | 0.00 | 0.00 | 7.61 | 29.59 | |
| Q139F | 0.56 | 0.10 | 18.27 | 0.60 | 0.07 | 11.59 | 14.93 | 29.59 | |
| Q139G | 0.25 | 0.04 | 17.07 | 0.27 | 0.06 | 22.22 | 19.65 | 29.59 | |
| Q139H | 1.05 | 0.35 | 33.78 | 1.37 | 0.22 | 16.39 | 25.08 | 24.78 | |
| Q139K | 1.65 | 0.43 | 26.37 | 2.15 | 0.48 | 22.23 | 24.30 | 29.59 | |
| Q139M | 0.14 | 0.02 | 10.95 | 0.22 | 0.00 | 0.00 | 5.47 | 29.59 | |
| Q139R | 1.02 | 1.55 | 152.26 | 1.39 | 0.40 | 28.81 | 90.54 | 24.78 | 144 |
| Q139S | 0.15 | 0.01 | 7.72 | 0.15 | 0.01 | 9.09 | 8.40 | 34.14 | |
| Q139T | 1.27 | 0.28 | 21.89 | 1.59 | 0.37 | 23.35 | 22.62 | 34.14 | |
| Q139V | 0.30 | 0.31 | 100.99 | 0.55 | 0.30 | 55.31 | 78.15 | 38.05 | 108 |
| Q140A | 1.66 | 0.40 | 23.75 | 1.71 | 0.49 | 28.33 | 26.04 | 34.14 | |
| Q140D | 1.15 | 0.23 | 19.84 | 1.74 | 0.39 | 22.19 | 21.01 | 34.14 | |
| Q140F | 1.21 | 0.24 | 19.82 | 1.64 | 0.35 | 21.18 | 20.50 | 34.14 | |
| Q140G | 1.77 | 0.46 | 26.17 | 2.26 | 0.50 | 21.90 | 24.03 | 34.14 | |
| Q140H | 4.85 | 2.41 | 49.73 | 2.61 | 0.98 | 37.45 | 43.59 | 28.36 | |
| Q140I | 2.10 | 0.54 | 25.65 | 1.41 | 0.22 | 15.65 | 20.65 | 28.36 | |
| Q140K | 1.65 | 0.63 | 38.37 | 1.73 | 0.58 | 33.65 | 36.01 | 20.67 | |
| Q140M | 0.81 | 0.29 | 35.50 | 0.95 | 0.32 | 34.05 | 34.78 | 20.67 | |
| Q140R | 2.51 | 1.08 | 43.00 | 1.98 | 0.65 | 32.67 | 37.83 | 28.36 | |
| Q140V | 2.50 | 0.59 | 23.72 | 1.65 | 0.34 | 20.70 | 22.21 | 28.36 | |
| Q140W | 1.92 | 0.40 | 20.94 | 1.11 | 0.15 | 13.67 | 17.30 | 28.36 | |
| Q140Y | 2.79 | 1.75 | 62.72 | 1.03 | 0.28 | 27.47 | 45.09 | 28.36 | |
| N141A | 0.34 | 0.15 | 43.86 | 0.40 | 0.21 | 52.74 | 48.30 | 30.39 | |
| N141D | 0.34 | 0.13 | 37.83 | 0.46 | 0.10 | 21.98 | 29.91 | 40.82 | |
| N141E | 0.74 | 0.27 | 36.59 | 0.69 | 0.35 | 51.04 | 43.81 | 38.36 | |
| N141F | 0.96 | 0.36 | 37.32 | 0.90 | 0.34 | 38.26 | 37.79 | 30.38 | |
| N141G | 0.56 | 0.21 | 37.21 | 0.54 | 0.19 | 35.39 | 36.30 | 30.38 | |
| N141H | 1.16 | 0.44 | 38.35 | 1.17 | 0.51 | 43.88 | 41.12 | 30.38 | |
| N141M | 0.17 | 0.20 | 118.21 | 0.20 | 0.22 | 110.95 | 114.58 | 36.07 | 163 |
| N141Q | 0.27 | 0.14 | 53.77 | 0.28 | 0.13 | 46.57 | 50.17 | 30.38 | 174 |
| N141R | 0.35 | 0.11 | 30.13 | 0.29 | 0.09 | 29.84 | 29.99 | 30.38 | |
| N141S | 2.01 | 0.65 | 32.33 | 1.91 | 0.60 | 31.45 | 31.89 | 30.38 | |
| N141T | 0.56 | 0.29 | 51.25 | 0.56 | 0.25 | 44.40 | 47.83 | 36.07 | |
| N141V | 0.89 | 0.12 | 14.00 | 0.91 | 0.09 | 9.48 | 11.74 | 40.82 | |
| N141W | 0.72 | 0.41 | 57.40 | 0.69 | 0.41 | 58.82 | 58.11 | 36.07 | 175 |
| N369H | 2.70 | 4.20 | 155.73 | 3.74 | 1.63 | 43.69 | 99.71 | 39.44 | 116 |
| V142C | 3.33 | 1.34 | 40.31 | 3.00 | 1.11 | 36.91 | 38.61 | 39.15 | |
| V142D | 0.73 | 0.28 | 38.28 | 0.81 | 0.27 | 33.11 | 35.69 | 39.15 | |
| V142E | 0.21 | 0.11 | 50.24 | 0.19 | 0.08 | 43.38 | 46.81 | 39.15 | |
| V142G | 1.53 | 0.57 | 37.45 | 1.23 | 0.40 | 32.81 | 35.13 | 39.15 | |
| V142H | 3.28 | 0.98 | 29.89 | 2.50 | 0.72 | 28.88 | 29.39 | 39.15 | |
| V142I | 2.16 | 0.65 | 30.22 | 1.82 | 0.49 | 26.67 | 28.45 | 39.15 | |
| V142K | 3.24 | 1.21 | 37.46 | 2.63 | 0.81 | 30.82 | 34.14 | 39.15 | |
| V142L | 1.77 | 0.50 | 27.95 | 1.40 | 0.41 | 29.02 | 28.49 | 32.77 | |
| V142M | 1.35 | 0.48 | 35.75 | 1.53 | 0.52 | 34.03 | 34.89 | 24.78 | |
| V142N | 3.17 | 0.80 | 25.30 | 2.45 | 0.54 | 22.15 | 23.72 | 32.77 | |
| V142Q | 0.21 | 0.12 | 56.12 | 0.17 | 0.10 | 59.36 | 57.74 | 32.77 | 177 |
| V142R | 3.44 | 1.02 | 29.62 | 3.22 | 0.87 | 26.96 | 28.29 | 32.77 | |
| V142S | 2.22 | 0.89 | 40.13 | 3.03 | 0.86 | 28.40 | 34.27 | 32.77 | |
| V142T | 3.63 | 1.78 | 49.15 | 3.61 | 1.16 | 32.24 | 40.70 | 32.77 | |
| Q143C | 4.23 | 1.84 | 43.50 | 4.14 | 1.70 | 41.15 | 42.32 | 38.82 | |
| Q143E | 1.99 | 0.62 | 31.37 | 1.57 | 0.47 | 29.90 | 30.63 | 38.82 | |
| Q143F | 0.33 | 0.13 | 40.92 | 0.33 | 0.13 | 40.92 | 40.92 | 39.93 | |
| Q143G | 0.40 | 0.20 | 49.56 | 0.46 | 0.22 | 47.49 | 48.53 | 37.23 | |
| Q143I | 1.05 | 0.52 | 49.47 | 1.19 | 0.51 | 42.71 | 46.09 | 36.07 | |
| F029H | 0.19 | 0.12 | 63.52 | 0.17 | 0.12 | 68.19 | 65.86 | 30.73 | 267 |
| Q143L | 3.60 | 1.12 | 31.16 | 3.06 | 0.95 | 30.88 | 31.02 | 38.82 | |
| Q143N | 1.28 | 0.49 | 38.50 | 1.12 | 0.40 | 35.87 | 37.19 | 38.82 | |
| Q143V | 2.67 | 0.83 | 31.01 | 2.08 | 0.66 | 31.55 | 31.28 | 38.82 | |
| R311G | 0.46 | 0.29 | 62.43 | 0.54 | 0.32 | 58.39 | 60.41 | 24.30 | 378 |
| L144R | 3.14 | 0.95 | 30.33 | 2.68 | 0.84 | 31.36 | 30.85 | 38.82 | |
| L144T | 2.93 | 1.07 | 36.56 | 2.94 | 0.81 | 27.69 | 32.12 | 38.82 | |
| L144W | 1.24 | 0.32 | 25.82 | 1.23 | 0.29 | 23.81 | 24.82 | 38.36 | |
| S145C | 0.44 | 0.13 | 28.86 | 0.38 | 0.11 | 29.56 | 29.21 | 31.06 | |
| S145D | 0.34 | 0.15 | 44.85 | 0.27 | 0.12 | 44.63 | 44.74 | 31.06 | |
| S145E | 0.83 | 0.23 | 28.25 | 0.79 | 0.18 | 22.21 | 25.23 | 31.06 | |
| S145P | 0.41 | 0.18 | 44.61 | 0.40 | 0.15 | 37.39 | 41.00 | 31.06 | |
| S145R | 3.81 | 0.70 | 18.37 | 3.69 | 0.68 | 18.37 | 18.37 | 24.42 | |
| L146E | 1.05 | 0.24 | 22.45 | 0.94 | 0.19 | 20.06 | 21.26 | 24.42 | |
| L146G | 1.51 | 0.22 | 14.58 | 1.35 | 0.14 | 10.30 | 12.44 | 24.42 | |
| L146V | 0.18 | 0.15 | 82.07 | 0.17 | 0.13 | 75.29 | 78.68 | 22.16 | 306 |
| L146Y | 0.69 | 0.30 | 42.70 | 0.76 | 0.33 | 43.15 | 42.93 | 28.04 | |
| T147G | 0.58 | 0.34 | 58.71 | 0.58 | 0.26 | 44.29 | 51.50 | 24.42 | 181 |
| A048G | 0.27 | 0.26 | 97.55 | 0.33 | 0.22 | 65.36 | 81.46 | 28.04 | 241 |
| T147M | 0.16 | 0.15 | 93.08 | 0.17 | 0.16 | 97.91 | 95.50 | 22.16 | 308 |
| T147Q | 2.26 | 0.72 | 31.73 | 2.48 | 0.67 | 27.13 | 29.43 | 24.42 | |
| T147R | 5.79 | 2.37 | 41.00 | 4.17 | 1.23 | 29.41 | 35.20 | 24.42 | |
| E148C | 0.17 | 0.17 | 103.59 | 0.18 | 0.16 | 90.91 | 97.25 | 22.16 | 309 |
| E148H | 0.17 | 0.13 | 76.33 | 0.13 | 0.15 | 108.21 | 92.27 | 22.16 | 310 |
| E148K | 0.14 | 0.11 | 80.37 | 0.14 | 0.11 | 80.87 | 80.62 | 22.16 | 311 |
| E148L | 0.36 | 0.17 | 46.78 | 0.40 | 0.17 | 41.71 | 44.24 | 38.36 | |
| E148Q | 1.16 | 0.36 | 30.83 | 1.37 | 0.29 | 21.24 | 26.03 | 25.15 | |
| E148R | 2.62 | 0.51 | 19.60 | 2.79 | 0.50 | 17.83 | 18.71 | 28.04 | |
| E148S | 0.63 | 0.23 | 35.91 | 0.75 | 0.19 | 25.76 | 30.84 | 38.36 | |
| E148Y | 0.67 | 0.11 | 16.13 | 0.62 | 0.12 | 18.67 | 17.40 | 25.15 | |
| A149C | 0.93 | 0.19 | 20.19 | 0.99 | 0.15 | 15.32 | 17.76 | 25.15 | |
| A149M | 1.18 | 0.18 | 15.43 | 1.29 | 0.19 | 14.70 | 15.07 | 25.15 | |
| A149Q | 2.66 | 0.57 | 21.60 | 2.27 | 0.51 | 22.41 | 22.00 | 30.69 | |
| A149R | 1.77 | 0.21 | 11.60 | 1.55 | 0.22 | 14.47 | 13.04 | 30.69 | |
| A149T | 0.82 | 0.19 | 23.51 | 0.86 | 0.17 | 19.97 | 21.74 | 30.69 | |
| A149V | 1.64 | 0.31 | 19.03 | 1.46 | 0.32 | 22.26 | 20.65 | 30.69 | |
| T150A | 0.78 | 0.06 | 7.35 | 0.69 | 0.06 | 8.62 | 7.98 | 31.59 | |
| T150C | 0.77 | 0.07 | 8.97 | 0.71 | 0.06 | 8.76 | 8.87 | 31.59 | |
| T150D | 1.15 | 0.13 | 11.48 | 1.09 | 0.12 | 10.65 | 11.06 | 31.59 | |
| T150E | 0.41 | 0.05 | 10.94 | 0.38 | 0.03 | 8.52 | 9.73 | 31.59 | |
| T150F | 0.39 | 0.03 | 8.63 | 0.42 | 0.02 | 5.71 | 7.17 | 31.59 | |
| T150G | 1.17 | 0.29 | 24.61 | 1.45 | 0.33 | 22.60 | 23.61 | 22.03 | |
| T150L | 0.20 | 0.13 | 63.84 | 0.17 | 0.17 | 95.93 | 79.89 | 27.54 | 372 |
| T150N | 0.51 | 0.04 | 6.94 | 0.49 | 0.01 | 2.46 | 4.70 | 31.59 | |
| T150R | 0.90 | 0.07 | 7.29 | 0.99 | 0.10 | 9.60 | 8.44 | 31.59 | |
| T150S | 0.86 | 0.28 | 32.96 | 0.99 | 0.34 | 33.91 | 33.44 | 36.75 | |
| T150W | 0.14 | 0.03 | 22.70 | 0.21 | 0.10 | 47.49 | 35.09 | 36.75 | |
| T150Y | 0.48 | 0.21 | 44.20 | 1.38 | 0.49 | 35.08 | 39.64 | 36.75 | |
| E151A | 1.25 | 0.44 | 34.82 | 1.30 | 0.29 | 22.32 | 28.57 | 14.96 | |
| E151C | 0.34 | 0.22 | 64.70 | 0.47 | 0.09 | 19.98 | 42.34 | 14.96 | |
| E151G | 0.39 | 0.12 | 29.99 | 0.38 | 0.09 | 22.66 | 26.32 | 14.96 | |
| E151H | 1.97 | 0.52 | 26.32 | 2.04 | 0.42 | 20.84 | 23.58 | 14.96 | |
| E151K | 0.22 | 0.01 | 6.05 | 0.24 | 0.03 | 14.14 | 10.09 | 14.96 | |
| E151M | 0.33 | 0.13 | 37.54 | 0.25 | 0.01 | 2.37 | 19.95 | 14.96 | |
| E151N | 1.07 | 0.16 | 15.15 | 1.02 | 0.18 | 17.14 | 16.14 | 3.38 | |
| E151Q | 0.10 | 0.12 | 116.75 | 0.34 | 0.14 | 39.82 | 78.28 | 38.36 | 138 |
| E151R | 0.26 | 0.00 | 0.00 | 0.19 | 0.00 | 0.00 | 0.00 | 3.38 | |
| E151S | 1.23 | 0.18 | 14.78 | 1.13 | 0.17 | 14.89 | 14.83 | 3.38 | |
| E151T | 0.67 | 0.09 | 13.80 | 0.74 | 0.05 | 6.12 | 9.96 | 3.38 | |
| E151V | 0.52 | 0.06 | 11.37 | 0.51 | 0.01 | 2.74 | 7.05 | 3.38 | |
| E151W | 1.46 | 0.23 | 15.69 | 1.65 | 0.15 | 8.93 | 12.31 | 3.38 | |
| E151Y | 1.43 | 0.23 | 16.14 | 1.73 | 0.18 | 10.52 | 13.33 | 3.38 | |
| K152A | 0.66 | 0.44 | 67.48 | 1.16 | 0.51 | 44.36 | 55.92 | 54.87 | 189 |
| K152C | 0.82 | 0.28 | 34.27 | 0.64 | 0.21 | 33.52 | 33.89 | 28.17 | |
| K152F | 0.83 | 0.20 | 23.51 | 0.80 | 0.20 | 24.39 | 23.95 | 16.94 | |
| K152I | 0.75 | 0.61 | 81.59 | 0.89 | 0.59 | 66.95 | 74.27 | 54.87 | 199 |
| K152M | 0.34 | 0.45 | 131.63 | 0.45 | 0.40 | 88.41 | 110.02 | 54.87 | 106 |
| K152R | 0.27 | 0.14 | 51.58 | 0.37 | 0.11 | 28.65 | 40.12 | 24.88 | |
| K152T | 0.12 | 0.31 | 269.40 | 0.14 | 0.23 | 160.70 | 215.05 | 54.87 | 107 |
| K152V | 0.98 | 0.37 | 37.21 | 1.11 | 0.33 | 30.20 | 33.71 | 16.94 | |
| K154R | 1.06 | 1.02 | 96.03 | 1.23 | 1.01 | 82.19 | 89.11 | 66.14 | 152 |
| Q155A | 0.87 | 0.99 | 113.56 | 0.97 | 0.95 | 97.48 | 105.52 | 66.14 | 112 |
| R060K | 1.04 | 0.59 | 56.16 | 1.27 | 0.46 | 36.35 | 46.26 | 26.81 | 385 |
| Q155F | 0.63 | 0.80 | 127.25 | 0.60 | 0.77 | 129.22 | 128.24 | 66.14 | 93 |
| Q155H | 3.15 | 1.86 | 59.05 | 6.16 | 4.65 | 75.49 | 67.27 | 32.29 | 236 |
| Q155K | 3.89 | 1.30 | 33.33 | 4.20 | 1.44 | 34.19 | 33.76 | 32.29 | |
| Q155L | 0.51 | 0.71 | 138.94 | 0.60 | 0.71 | 119.04 | 128.99 | 66.14 | 91 |
| Q155M | 2.23 | 0.78 | 34.89 | 2.14 | 0.66 | 30.76 | 32.83 | 32.29 | |
| Q155R | 1.72 | 1.30 | 75.66 | 1.79 | 1.26 | 70.39 | 73.02 | 66.14 | 205 |
| Q155S | 1.57 | 0.88 | 55.98 | 0.23 | 0.17 | 74.46 | 65.22 | 29.93 | 264 |
| Q155T | 0.62 | 0.25 | 40.55 | 1.12 | 0.52 | 46.72 | 43.64 | 29.93 | |
| Q155V | 1.40 | 0.74 | 53.05 | 1.19 | 0.59 | 49.41 | 51.23 | 29.93 | 201 |
| Q155W | 1.47 | 0.72 | 48.81 | 1.58 | 0.68 | 42.73 | 45.77 | 34.46 | |
| E156A | 1.04 | 0.53 | 51.30 | 0.32 | 0.21 | 64.41 | 57.86 | 29.93 | 202 |
| E156C | 0.63 | 0.36 | 57.78 | 0.43 | 0.23 | 53.52 | 55.65 | 29.93 | 203 |
| E156M | 0.67 | 0.29 | 43.47 | 0.67 | 0.29 | 43.22 | 43.34 | 29.93 | |
| E156Q | 1.63 | 0.91 | 55.52 | 1.39 | 0.86 | 61.75 | 58.64 | 29.93 | 204 |
| E156S | 0.00 | 1.28 | #DIV/0! | 0.81 | 2.75 | 340.88 | #DIV/0! | 29.93 | |
| E158A | 0.36 | 0.09 | 24.83 | 0.44 | 0.07 | 16.13 | 20.48 | 20.63 | |
| E158F | 0.92 | 0.19 | 21.21 | 0.91 | 0.24 | 26.23 | 23.72 | 24.02 | |
| E158H | 0.18 | 0.10 | 54.78 | 0.19 | 0.20 | 101.55 | 78.16 | 40.82 | 75 |
| E158Q | 1.33 | 0.27 | 20.20 | 1.44 | 0.80 | 55.37 | 37.78 | 40.82 | |
| E158S | 2.08 | 0.41 | 19.83 | 2.14 | 0.49 | 23.14 | 21.48 | 24.02 | |
| K159A | 0.70 | 0.41 | 58.70 | 0.79 | 0.60 | 76.82 | 67.76 | 40.82 | 231 |
| K159H | 0.48 | 0.36 | 75.44 | 0.67 | 0.45 | 66.99 | 71.22 | 40.82 | 208 |
| S261F | 0.23 | 0.22 | 96.52 | 0.22 | 0.23 | 106.85 | 101.69 | 35.71 | 179 |
| K159Q | 0.56 | 0.47 | 83.64 | 0.68 | 0.50 | 73.34 | 78.49 | 40.82 | 194 |
| K159S | 0.12 | 0.22 | 174.09 | 0.12 | 0.25 | 211.72 | 192.90 | 40.82 | 85 |
| A160R | 0.80 | 0.23 | 28.81 | 0.79 | 0.22 | 27.66 | 28.24 | 12.37 | |
| A160S | 0.96 | 0.35 | 36.05 | 0.92 | 0.35 | 38.60 | 37.32 | 12.37 | |
| A160V | 0.60 | 0.12 | 19.37 | 0.57 | 0.14 | 24.50 | 21.93 | 16.94 | |
| A160W | 0.54 | 0.16 | 29.20 | 0.46 | 0.18 | 38.26 | 33.73 | 24.02 | |
| A160Y | 0.14 | 0.13 | 93.33 | 0.15 | 0.14 | 90.82 | 92.08 | 12.37 | 377 |
| G161A | 0.70 | 0.45 | 63.69 | 0.65 | 0.40 | 61.94 | 62.82 | 12.37 | 323 |
| G161D | 0.60 | 0.35 | 58.33 | 0.62 | 0.36 | 57.97 | 58.15 | 16.94 | 213 |
| G161S | 1.15 | 0.52 | 45.65 | 1.20 | 0.53 | 44.31 | 44.98 | 28.73 | |
| K162L | 0.26 | 0.16 | 61.43 | 0.28 | 0.17 | 60.39 | 60.91 | 24.02 | 101 |
| K162M | 0.79 | 0.30 | 37.52 | 0.79 | 0.27 | 33.59 | 35.55 | 24.02 | |
| K162Y | 0.17 | 0.06 | 35.03 | 0.20 | 0.02 | 9.34 | 22.19 | 28.73 | |
| D163A | 0.69 | 0.29 | 42.22 | 1.01 | 0.35 | 34.97 | 38.59 | 36.75 | |
| D163E | 0.86 | 0.30 | 34.89 | 0.93 | 0.37 | 39.83 | 37.36 | 30.69 | |
| D163F | 0.40 | 0.17 | 43.14 | 0.44 | 0.16 | 36.15 | 39.64 | 29.57 | |
| D163K | 0.24 | 0.21 | 89.35 | 0.83 | 0.32 | 38.64 | 64.00 | 26.52 | 349 |
| D163L | 0.45 | 0.16 | 34.44 | 0.56 | 0.18 | 31.23 | 32.83 | 36.75 | |
| D163Q | 1.99 | 0.55 | 27.72 | 2.14 | 0.66 | 30.56 | 29.14 | 30.69 | |
| D163R | 0.30 | 0.32 | 107.31 | 0.25 | 0.14 | 56.94 | 82.13 | 30.69 | 180 |
| D163S | 3.27 | 2.06 | 63.08 | 4.19 | 2.74 | 65.33 | 64.20 | 32.76 | 284 |
| F164L | 0.21 | 0.05 | 23.79 | 0.19 | 0.07 | 35.06 | 29.43 | 4.69 | |
| F164M | 0.72 | 0.23 | 31.60 | 0.81 | 0.25 | 30.51 | 31.06 | 28.73 | |
| F164W | 0.20 | 0.07 | 37.85 | 0.13 | 0.05 | 40.54 | 39.20 | 28.73 | |
| V058R | 2.39 | 1.76 | 73.42 | 2.46 | 1.65 | 67.00 | 70.21 | 26.81 | 220 |
| V166A | 0.58 | 0.19 | 32.53 | 0.55 | 0.16 | 28.51 | 30.52 | 17.50 | |
| V166C | 0.28 | 0.04 | 14.44 | 0.24 | 0.04 | 16.05 | 15.24 | 28.73 | |
| V166E | 0.26 | 0.02 | 8.93 | 0.24 | 0.04 | 15.05 | 11.99 | 12.92 | |
| V166F | 0.38 | 0.16 | 40.83 | 0.53 | 0.20 | 37.61 | 39.22 | 28.50 | |
| V166G | 0.26 | 0.02 | 8.93 | 0.29 | 0.05 | 15.48 | 12.20 | 12.92 | |
| V166H | 0.16 | 0.03 | 19.75 | 0.18 | 0.04 | 23.22 | 21.48 | 12.92 | |
| V166L | 0.33 | 0.15 | 45.04 | 0.42 | 0.20 | 46.65 | 45.84 | 36.75 | |
| V166L | 1.25 | 0.29 | 23.37 | 1.33 | 0.47 | 35.72 | 29.55 | 28.50 | |
| V166Q | 0.80 | 0.30 | 38.05 | 0.92 | 0.26 | 28.05 | 33.05 | 28.50 | |
| V166R | 1.55 | 0.54 | 34.92 | 1.23 | 0.47 | 38.67 | 36.80 | 28.17 | |
| V166T | 0.39 | 0.14 | 36.19 | 0.36 | 0.15 | 41.71 | 38.95 | 14.03 | |
| V166W | 0.29 | 0.08 | 26.99 | 0.26 | 0.10 | 39.77 | 33.38 | 14.03 | |
| V166Y | 0.56 | 0.14 | 25.07 | 0.63 | 0.16 | 24.80 | 24.93 | 28.50 | |
| E167A | 0.32 | 0.11 | 32.97 | 0.27 | 0.11 | 41.88 | 37.43 | 14.03 | |
| E167D | 0.59 | 0.22 | 36.16 | 0.75 | 0.17 | 22.51 | 29.34 | 20.63 | |
| E167G | 0.39 | 0.14 | 37.00 | 0.46 | 0.17 | 36.78 | 36.89 | 28.50 | |
| E167K | 0.71 | 0.15 | 20.82 | 0.25 | 0.09 | 36.60 | 28.71 | 14.03 | |
| E167R | 0.58 | 0.14 | 24.76 | 0.71 | 0.18 | 25.28 | 25.02 | 28.50 | |
| E167S | 0.30 | 0.05 | 14.93 | 0.23 | 0.10 | 42.86 | 28.89 | 19.52 | |
| E167T | 0.55 | 0.16 | 30.16 | 0.58 | 0.16 | 27.45 | 28.80 | 20.67 | |
| E167Y | 0.33 | 0.09 | 25.68 | 0.35 | 0.07 | 20.54 | 23.11 | 16.69 | |
| I169L | 2.97 | 0.91 | 30.74 | 2.74 | 0.56 | 20.40 | 25.57 | 16.69 | |
| I169V | 0.33 | 0.09 | 26.63 | 0.33 | 0.14 | 40.66 | 33.64 | 19.52 | |
| K170Q | 0.62 | 0.19 | 30.75 | 0.59 | 0.16 | 26.71 | 28.73 | 20.67 | |
| K170R | 0.52 | 0.28 | 53.86 | 0.46 | 0.23 | 50.16 | 52.01 | 3.94 | 219 |
| L171V | 1.87 | 0.42 | 22.28 | 1.18 | 0.32 | 27.20 | 24.74 | 3.94 | |
| G172A | 2.97 | 0.78 | 26.37 | 2.61 | 0.46 | 17.81 | 22.09 | 3.94 | |
| G172C | 1.05 | 0.27 | 25.94 | 0.80 | 0.25 | 30.99 | 28.46 | 3.94 | |
| K173R | 1.86 | 0.62 | 33.14 | 1.59 | 0.44 | 27.44 | 30.29 | 3.94 | |
| L174A | 4.18 | 1.64 | 39.29 | 3.25 | 0.96 | 29.61 | 34.45 | 3.94 | |
| L174G | 3.79 | 1.29 | 34.07 | 2.32 | 0.74 | 31.82 | 32.95 | 3.94 | |
| L174H | 1.10 | 0.47 | 42.81 | 1.04 | 0.38 | 36.95 | 39.88 | 20.63 | |
| L174K | 10.56 | 5.96 | 56.41 | 6.89 | 2.82 | 40.94 | 48.68 | 3.94 | |
| L174M | 2.96 | 1.06 | 35.67 | 4.41 | 1.74 | 39.48 | 37.57 | 5.72 | |
| L174N | 1.95 | 0.65 | 33.28 | 1.71 | 0.45 | 26.08 | 29.68 | 5.72 | |
| L174Q | 2.66 | 0.85 | 32.03 | 2.72 | 0.61 | 22.47 | 27.25 | 5.72 | |
| L174R | 0.78 | 0.32 | 40.88 | 0.72 | 0.27 | 37.08 | 38.98 | 5.72 | |
| L174S | 0.82 | 0.29 | 35.79 | 0.58 | 0.21 | 36.16 | 35.97 | 5.72 | |
| L174T | 2.31 | 0.73 | 31.42 | 2.09 | 0.52 | 24.87 | 28.15 | 5.72 | |
| L174V | 1.67 | 0.45 | 26.80 | 1.60 | 0.40 | 25.16 | 25.98 | 5.72 | |
| K159N | 0.24 | 0.30 | 123.57 | 0.28 | 0.30 | 105.45 | 114.51 | 40.82 | 80 |
| L175T | 1.01 | 0.19 | 18.62 | 0.77 | 0.13 | 17.54 | 18.08 | 1.38 | |
| L175V | 0.80 | 0.11 | 14.33 | 0.87 | 0.11 | 12.67 | 13.50 | 1.38 | |
| L175Y | 0.61 | 0.11 | 17.92 | 0.62 | 0.06 | 9.25 | 13.59 | 1.38 | |
| R176L | 0.58 | 0.12 | 20.07 | 0.65 | 0.12 | 18.64 | 19.36 | 1.38 | |
| N178K | 0.19 | 0.05 | 28.35 | 0.15 | 0.07 | 48.82 | 38.58 | 1.38 | |
| N178M | 0.30 | 0.09 | 29.49 | 0.26 | 0.05 | 18.71 | 24.10 | 1.38 | |
| H179K | 2.92 | 0.96 | 32.68 | 3.49 | 1.02 | 29.13 | 30.90 | 16.98 | |
| H179M | 1.06 | 0.22 | 21.09 | 1.07 | 0.20 | 18.22 | 19.66 | 16.98 | |
| H179R | 1.44 | 0.52 | 36.11 | 1.59 | 0.48 | 30.36 | 33.23 | 16.98 | |
| H179S | 0.49 | 0.20 | 40.47 | 0.45 | 0.15 | 32.88 | 36.68 | 16.98 | |
| L180F | 1.04 | 0.27 | 25.41 | 1.11 | 0.24 | 22.04 | 23.72 | 16.98 | |
| L180I | 0.71 | 0.17 | 23.80 | 0.69 | 0.18 | 25.56 | 24.68 | 16.98 | |
| L180K | 0.39 | 0.14 | 35.29 | 0.57 | 0.00 | 0.00 | 17.65 | 36.75 | |
| Y183L | 0.61 | 0.44 | 71.77 | 1.29 | 0.36 | 28.09 | 49.93 | 1.44 | |
| F186Y | 1.02 | 0.27 | 26.07 | 1.12 | 0.21 | 18.55 | 22.31 | 1.44 | |
| H192S | 0.31 | 0.06 | 19.33 | 0.27 | 0.07 | 26.47 | 22.90 | 35.00 | |
| H193F | 0.30 | 0.13 | 42.24 | 0.33 | 0.14 | 41.41 | 41.83 | 27.54 | |
| H193Q | 0.20 | 0.09 | 46.67 | 0.26 | 0.00 | 0.00 | 23.33 | 0.00 | |
| H193R | 0.11 | 0.00 | 0.00 | 0.19 | 0.00 | 0.00 | 0.00 | 0.00 | |
| K195A | 0.26 | 0.04 | 16.70 | 0.37 | 0.00 | 0.00 | 8.35 | 0.00 | |
| K195H | 0.91 | 0.56 | 61.51 | 0.72 | 0.45 | 62.10 | 61.81 | 34.96 | 353 |
| K195L | 0.53 | 0.42 | 80.78 | 0.45 | 0.24 | 53.98 | 67.38 | 34.96 | 232 |
| K195N | 0.68 | 0.36 | 53.69 | 0.50 | 0.30 | 59.82 | 56.75 | 34.96 | 223 |
| K195R | 1.05 | 0.42 | 40.04 | 1.50 | 0.29 | 18.96 | 29.50 | 34.96 | |
| K195S | 0.22 | 0.00 | 0.00 | 0.24 | 0.00 | 0.00 | 0.00 | 0.00 | |
| K195V | 0.27 | 0.00 | 0.00 | 0.18 | 0.00 | 0.00 | 0.00 | 0.00 | |
| K195W | 0.22 | 0.08 | 36.04 | 0.21 | 0.06 | 30.33 | 33.18 | 35.00 | |
| K196L | 0.70 | 0.28 | 39.70 | 0.66 | 0.20 | 30.19 | 34.95 | 34.96 | |
| K196N | 0.24 | 0.00 | 0.00 | 0.23 | 0.00 | 0.00 | 0.00 | 0.00 | |
| K196R | 0.60 | 0.04 | 5.83 | 0.62 | 0.02 | 2.66 | 4.24 | 0.00 | |
| K196S | 0.37 | 0.04 | 10.56 | 0.36 | 0.08 | 23.18 | 16.87 | 0.00 | |
| K196T | 0.29 | 0.16 | 56.32 | 0.30 | 0.22 | 71.19 | 63.75 | 27.54 | 375 |
| K196W | 0.56 | 0.14 | 25.70 | 0.29 | 0.11 | 37.98 | 31.84 | 34.96 | |
| K196Y | 0.40 | 0.16 | 39.90 | 0.29 | 0.11 | 38.41 | 39.15 | 34.96 | |
| P197A | 0.48 | 0.00 | 0.00 | 0.44 | 0.00 | 0.00 | 0.00 | 0.00 | |
| P197D | 0.16 | 0.00 | 0.00 | 0.16 | 0.00 | 0.00 | 0.00 | 0.00 | |
| P197E | 0.28 | 0.00 | 0.00 | 0.23 | 0.00 | 0.00 | 0.00 | 0.00 | |
| P197F | 0.52 | 0.36 | 67.97 | 0.59 | 0.42 | 72.00 | 69.99 | 35.71 | 222 |
| P197G | 0.36 | 0.00 | 0.00 | 0.31 | 0.00 | 0.00 | 0.00 | 0.00 | |
| P197H | 0.69 | 0.00 | 0.00 | 0.73 | 0.00 | 0.00 | 0.00 | 0.00 | |
| P197K | 0.83 | 0.31 | 37.05 | 0.81 | 0.31 | 38.30 | 37.67 | 24.02 | |
| P197L | 0.93 | 0.00 | 0.00 | 0.62 | 0.00 | 0.00 | 0.00 | 0.00 | |
| P197R | 0.72 | 0.27 | 37.34 | 0.93 | 0.32 | 34.40 | 35.87 | 24.02 | |
| P197S | 0.62 | 0.00 | 0.00 | 0.92 | 0.00 | 0.00 | 0.00 | 0.00 | |
| G198A | 0.61 | 0.00 | 0.00 | 0.44 | 0.00 | 0.00 | 0.00 | 0.00 | |
| G198D | 0.59 | 0.00 | 0.00 | 0.56 | 0.00 | 0.00 | 0.00 | 0.00 | |
| G198H | 1.18 | 0.00 | 0.00 | 1.14 | 0.00 | 0.00 | 0.00 | 0.00 | |
| G198L | 0.49 | 0.40 | 81.66 | 0.46 | 0.43 | 93.58 | 87.62 | 35.71 | 162 |
| G198N | 1.55 | 0.21 | 13.26 | 1.36 | 0.17 | 12.79 | 13.02 | 0.00 | |
| G198Q | 0.98 | 0.00 | 0.00 | 1.05 | 0.08 | 7.18 | 3.59 | 0.00 | |
| G198R | 1.19 | 0.00 | 0.00 | 1.36 | 0.07 | 5.15 | 2.58 | 0.00 | |
| G198S | 0.41 | 0.07 | 17.94 | 0.52 | 0.07 | 14.23 | 16.08 | 0.00 | |
| G198W | 0.27 | 0.07 | 26.09 | 0.29 | 0.07 | 22.35 | 24.22 | 35.00 | |
| G198Y | 0.06 | 0.00 | 0.00 | 0.13 | 0.00 | 0.00 | 0.00 | 0.00 | |
| S202M | 0.37 | 0.21 | 55.17 | 0.30 | 0.14 | 46.37 | 50.77 | 24.67 | 227 |
| A412S | 0.20 | 0.20 | 97.26 | 0.23 | 0.15 | 66.96 | 82.11 | 28.04 | 245 |
| D030P | 0.41 | 0.18 | 43.15 | 0.38 | 0.17 | 45.28 | 44.21 | 30.73 | 386 |
| N205D | 0.85 | 0.18 | 21.22 | 1.27 | 0.49 | 38.68 | 29.95 | 0.00 | |
| N205E | 1.94 | 1.26 | 64.97 | 1.09 | 0.66 | 60.29 | 62.63 | 27.08 | 330 |
| N205G | 1.46 | 0.65 | 44.60 | 0.97 | 0.39 | 39.78 | 42.19 | 27.08 | |
| N205K | 0.73 | 0.45 | 61.35 | 0.77 | 0.45 | 58.87 | 60.11 | 35.71 | 379 |
| N205L | 0.98 | 0.74 | 75.71 | 1.83 | 2.65 | 144.54 | 110.13 | 31.65 | 98 |
| N205P | 1.37 | 0.91 | 66.52 | 1.28 | 0.67 | 52.43 | 59.48 | 27.08 | 233 |
| N205S | 1.45 | 0.80 | 55.05 | 0.96 | 0.46 | 48.12 | 51.58 | 27.08 | 234 |
| N205T | 0.29 | 0.28 | 95.18 | 0.32 | 0.26 | 79.32 | 87.25 | 27.08 | 209 |
| L037K | 0.35 | 0.27 | 78.61 | 0.53 | 0.29 | 53.62 | 66.12 | 36.50 | 320 |
| V206S | 0.45 | 0.10 | 22.04 | 0.45 | 0.12 | 26.36 | 24.20 | 35.00 | |
| I208K | 0.71 | 0.13 | 18.14 | 0.75 | 0.16 | 21.49 | 19.81 | 35.00 | |
| I208L | 0.91 | 0.53 | 58.27 | 0.77 | 0.46 | 60.57 | 59.42 | 27.08 | 237 |
| I208Q | 0.37 | 0.35 | 94.65 | 0.63 | 0.31 | 49.76 | 72.20 | 27.08 | 210 |
| I208R | 1.81 | 0.72 | 40.10 | 3.00 | 8.44 | 281.43 | 160.77 | 31.65 | 81 |
| I208S | 1.33 | 0.04 | 2.67 | 1.33 | 0.00 | 0.00 | 1.34 | 0.00 | |
| I208T | 1.46 | 0.12 | 8.11 | 1.51 | 0.01 | 0.50 | 4.30 | 0.00 | |
| I208V | 1.15 | 0.20 | 17.37 | 1.16 | 0.02 | 1.93 | 9.65 | 0.00 | |
| I208M | 0.43 | 0.21 | 48.65 | 0.29 | 0.14 | 49.23 | 48.94 | 28.17 | |
| K209L | 0.66 | 0.09 | 13.19 | 0.66 | 0.00 | 0.00 | 6.60 | 0.00 | |
| K209N | 0.90 | 0.09 | 9.59 | 0.87 | 0.00 | 0.00 | 4.79 | 0.00 | |
| K209R | 1.07 | 0.15 | 13.63 | 0.92 | 0.02 | 2.22 | 7.93 | 0.00 | |
| D212N | 1.85 | 0.35 | 18.79 | 1.80 | 0.34 | 19.07 | 18.93 | 1.44 | |
| D212S | 1.30 | 0.15 | 11.72 | 1.50 | 0.16 | 10.93 | 11.32 | 1.44 | |
| D212T | 1.45 | 0.18 | 12.36 | 1.25 | 0.15 | 11.84 | 12.10 | 1.44 | |
| D213A | 1.00 | 0.29 | 29.52 | 1.09 | 0.29 | 26.24 | 27.88 | 27.78 | |
| D213E | 0.73 | 0.46 | 63.17 | 0.73 | 0.47 | 64.69 | 63.93 | 35.71 | 287 |
| D213G | 1.66 | 0.33 | 19.69 | 1.71 | 0.18 | 10.65 | 15.17 | 14.25 | |
| D213H | 1.75 | 0.27 | 15.70 | 1.54 | 0.15 | 9.92 | 12.81 | 14.25 | |
| D213K | 1.50 | 0.40 | 26.72 | 1.21 | 0.29 | 23.95 | 25.33 | 14.25 | |
| D213L | 0.54 | 0.18 | 33.18 | 0.55 | 0.16 | 29.55 | 31.37 | 14.25 | |
| D213M | 0.83 | 0.26 | 30.94 | 0.82 | 0.20 | 24.50 | 27.72 | 14.25 | |
| D213N | 1.73 | 1.35 | 78.37 | 2.68 | 2.33 | 86.98 | 82.68 | 31.65 | 186 |
| D213Q | 1.40 | 0.49 | 35.17 | 1.37 | 0.34 | 25.12 | 30.14 | 14.25 | |
| D213R | 0.70 | 0.35 | 49.36 | 0.60 | 0.26 | 43.50 | 46.43 | 14.25 | |
| S215A | 2.07 | 1.04 | 50.36 | 2.17 | 1.29 | 59.27 | 54.82 | 36.49 | 242 |
| S215D | 1.12 | 0.49 | 43.59 | 1.06 | 0.62 | 58.22 | 50.90 | 36.49 | 243 |
| S215E | 0.48 | 0.49 | 101.77 | 0.63 | 0.49 | 78.14 | 89.96 | 36.49 | 148 |
| S215G | 1.90 | 0.80 | 41.92 | 1.86 | 0.82 | 43.75 | 42.83 | 36.49 | |
| S215H | 0.89 | 0.48 | 53.84 | 0.94 | 0.64 | 68.70 | 61.27 | 36.49 | 369 |
| S215K | 1.43 | 0.66 | 46.48 | 1.72 | 0.82 | 47.79 | 47.14 | 36.49 | |
| S215L | 1.08 | 0.48 | 44.92 | 1.05 | 0.57 | 54.41 | 49.67 | 36.49 | |
| S215Q | 1.30 | 0.69 | 53.17 | 1.05 | 0.33 | 30.91 | 42.04 | 19.93 | |
| S215R | 0.69 | 0.29 | 42.85 | 0.97 | 0.26 | 26.97 | 34.91 | 19.93 | |
| V277A | 0.24 | 0.42 | 171.66 | 0.26 | 0.49 | 189.90 | 180.78 | 37.53 | 129 |
| S215V | 1.17 | 0.57 | 48.67 | 1.27 | 0.66 | 51.78 | 50.22 | 19.93 | 247 |
| S215W | 0.64 | 0.40 | 62.97 | 0.82 | 0.44 | 53.38 | 58.17 | 19.93 | 248 |
| N219A | 0.54 | 0.38 | 69.25 | 0.84 | 0.35 | 41.54 | 55.40 | 19.93 | 249 |
| N219C | 0.18 | 0.08 | 41.69 | 0.15 | 0.06 | 39.93 | 40.81 | 27.78 | |
| N219E | 0.86 | 0.36 | 41.47 | 1.10 | 0.36 | 33.23 | 37.35 | 19.93 | |
| N219H | 0.63 | 0.16 | 25.66 | 0.54 | 0.04 | 7.84 | 16.75 | 19.93 | |
| N219I | 0.58 | 0.18 | 30.54 | 1.61 | 0.95 | 58.81 | 44.68 | 8.29 | |
| N219K | 1.05 | 0.51 | 48.85 | 2.10 | 1.06 | 50.35 | 49.60 | 8.29 | |
| N219L | 1.03 | 0.28 | 26.78 | 1.41 | 0.43 | 30.25 | 28.51 | 8.29 | |
| N219M | 0.73 | 0.16 | 22.13 | 1.12 | 0.25 | 22.02 | 22.08 | 8.29 | |
| N219R | 0.83 | 0.37 | 44.51 | 1.50 | 0.83 | 55.63 | 50.07 | 8.29 | 250 |
| N219S | 0.56 | 0.31 | 54.85 | 1.30 | 0.64 | 49.33 | 52.09 | 8.29 | 251 |
| N219T | 0.75 | 0.26 | 35.37 | 1.96 | 1.48 | 75.29 | 55.33 | 8.29 | 252 |
| N219W | 0.93 | 0.00 | 0.00 | 0.69 | 0.00 | 0.00 | 0.00 | 6.84 | |
| E220A | 0.30 | 0.06 | 20.27 | 0.20 | 0.00 | 0.00 | 10.13 | 6.84 | |
| E220H | 3.03 | 0.82 | 27.16 | 2.37 | 0.42 | 17.61 | 22.39 | 6.84 | |
| E220I | 1.70 | 0.42 | 24.73 | 1.30 | 0.16 | 12.40 | 18.56 | 6.84 | |
| E220M | 1.25 | 0.37 | 29.58 | 1.15 | 0.20 | 17.19 | 23.39 | 6.84 | |
| E220S | 2.30 | 0.69 | 29.85 | 1.59 | 0.31 | 19.20 | 24.53 | 6.84 | |
| E220T | 3.37 | 0.87 | 25.87 | 2.36 | 0.42 | 17.85 | 21.86 | 6.84 | |
| E220V | 4.24 | 2.32 | 54.75 | 2.95 | 1.09 | 36.86 | 45.80 | 6.84 | 384 |
| S221A | 0.45 | 0.10 | 21.61 | 0.49 | 0.11 | 21.56 | 21.59 | 27.78 | |
| S221C | 0.57 | 0.06 | 10.71 | 0.65 | 0.08 | 12.94 | 11.82 | 27.78 | |
| S221M | 0.31 | 0.04 | 14.17 | 0.28 | 0.05 | 16.43 | 15.30 | 27.78 | |
| S221T | 0.81 | 0.17 | 21.29 | 0.97 | 0.21 | 21.44 | 21.36 | 27.78 | |
| S221V | 0.19 | 0.10 | 51.32 | 0.14 | 0.06 | 41.96 | 46.64 | 27.78 | |
| T222K | 0.90 | 0.28 | 30.87 | 1.48 | 0.66 | 44.68 | 37.77 | 25.54 | |
| T222N | 0.24 | 0.20 | 82.55 | 0.43 | 0.18 | 40.77 | 61.66 | 32.47 | 361 |
| L230I | 0.71 | 0.37 | 52.91 | 0.68 | 0.29 | 42.46 | 47.68 | 33.75 | |
| T232F | 0.32 | 0.14 | 44.22 | 0.41 | 0.18 | 42.60 | 43.41 | 25.54 | |
| T232S | 1.43 | 0.46 | 32.20 | 1.11 | 0.41 | 36.90 | 34.55 | 7.79 | |
| Q233K | 1.38 | 0.34 | 24.64 | 1.45 | 0.33 | 23.05 | 23.84 | 7.79 | |
| Q233L | 1.10 | 0.22 | 19.94 | 1.03 | 0.18 | 17.28 | 18.61 | 7.79 | |
| Q233R | 0.76 | 0.33 | 43.34 | 0.75 | 0.26 | 34.98 | 39.16 | 32.47 | |
| Q234M | 1.08 | 0.65 | 59.85 | 1.18 | 0.58 | 49.11 | 54.48 | 7.79 | 254 |
| S235A | 0.25 | 0.10 | 38.98 | 0.28 | 0.10 | 37.45 | 38.22 | 25.54 | |
| S235G | 0.82 | 0.21 | 25.52 | 0.81 | 0.17 | 21.14 | 23.33 | 7.79 | |
| S235K | 0.49 | 0.10 | 19.53 | 0.40 | 0.02 | 5.99 | 12.76 | 7.79 | |
| N205A | 0.39 | 0.40 | 103.37 | 0.37 | 0.40 | 110.82 | 107.10 | 35.71 | 173 |
| P236A | 1.65 | 0.09 | 5.60 | 1.51 | 0.05 | 3.59 | 4.59 | 0.00 | |
| P236G | 1.29 | 0.04 | 2.75 | 1.20 | 0.00 | 0.00 | 1.37 | 0.00 | |
| P236H | 0.57 | 0.00 | 0.00 | 0.47 | 0.00 | 0.00 | 0.00 | 0.00 | |
| P236K | 0.49 | 0.00 | 0.00 | 0.44 | 0.00 | 0.00 | 0.00 | 0.00 | |
| P236R | 0.56 | 0.00 | 0.00 | 0.47 | 0.00 | 0.00 | 0.00 | 0.00 | |
| P236S | 0.34 | 0.14 | 41.41 | 0.55 | 0.17 | 31.25 | 36.33 | 25.54 | |
| V237A | 1.28 | 0.43 | 33.36 | 1.30 | 0.73 | 56.01 | 44.68 | 24.67 | |
| V237E | 0.47 | 0.00 | 0.00 | 0.45 | 0.00 | 0.00 | 0.00 | 0.00 | |
| V237H | 0.31 | 0.13 | 42.20 | 0.44 | 0.16 | 37.57 | 39.88 | 25.54 | |
| V237L | 1.55 | 0.07 | 4.71 | 1.66 | 0.02 | 1.17 | 2.94 | 0.00 | |
| V237N | 1.37 | 0.00 | 0.33 | 1.24 | 0.00 | 0.00 | 0.16 | 0.00 | |
| V237Q | 2.10 | 1.66 | 79.06 | 3.44 | 2.48 | 72.08 | 75.57 | 31.65 | 197 |
| V237R | 0.72 | 0.00 | 0.00 | 0.78 | 0.00 | 0.00 | 0.00 | 0.00 | |
| V237S | 0.67 | 0.00 | 0.00 | 0.70 | 0.00 | 0.00 | 0.00 | 0.00 | |
| V237T | 0.25 | 0.13 | 51.49 | 0.37 | 0.15 | 40.70 | 46.10 | 25.54 | |
| V237W | 0.49 | 0.00 | 0.00 | 0.53 | 0.00 | 0.00 | 0.00 | 0.00 | |
| A238D | 1.65 | 0.02 | 1.21 | 1.31 | 0.00 | 0.00 | 0.61 | 0.00 | |
| A238E | 0.81 | 0.00 | 0.00 | 0.74 | 0.00 | 0.00 | 0.00 | 0.00 | |
| A238H | 1.07 | 0.00 | 0.00 | 0.99 | 0.00 | 0.00 | 0.00 | 0.00 | |
| A238R | 0.35 | 0.17 | 47.94 | 0.34 | 0.15 | 45.07 | 46.50 | 24.67 | |
| A238S | 0.77 | 0.00 | 0.00 | 0.90 | 0.00 | 0.00 | 0.00 | 0.00 | |
| A238T | 0.68 | 0.00 | 0.00 | 0.82 | 0.00 | 0.00 | 0.00 | 0.00 | |
| A239K | 0.29 | 0.10 | 33.85 | 0.35 | 0.15 | 41.13 | 37.49 | 25.54 | |
| T240A | 0.53 | 0.00 | 0.00 | 0.90 | 0.00 | 0.00 | 0.00 | 0.00 | |
| T240K | 2.13 | 0.73 | 34.34 | 1.39 | 0.53 | 37.95 | 36.15 | 24.67 | |
| T240M | 0.84 | 0.00 | 0.00 | 0.92 | 0.00 | 0.00 | 0.00 | 0.00 | |
| T240Q | 1.21 | 1.38 | 114.10 | 1.21 | 0.57 | 46.78 | 80.44 | 27.49 | 190 |
| T240R | 1.33 | 0.04 | 3.31 | 1.73 | 0.04 | 2.22 | 2.76 | 0.00 | |
| T240S | 0.39 | 0.00 | 0.00 | 0.44 | 0.00 | 0.00 | 0.00 | 0.00 | |
| T240V | 2.25 | 0.22 | 9.76 | 2.18 | 0.16 | 7.54 | 8.65 | 0.00 | |
| Y242F | 0.52 | 0.09 | 17.08 | 0.37 | 0.11 | 30.39 | 23.73 | 27.87 | |
| N245H | 1.04 | 0.30 | 28.83 | 0.75 | 0.17 | 22.00 | 25.42 | 27.87 | |
| V247I | 0.18 | 0.12 | 63.29 | 0.14 | 0.09 | 59.58 | 61.43 | 27.87 | 265 |
| V247L | 1.89 | 0.48 | 25.41 | 1.52 | 0.35 | 23.06 | 24.24 | 27.87 | |
| I251L | 0.59 | 0.48 | 81.48 | 0.89 | 0.79 | 89.42 | 85.45 | 31.65 | 172 |
| I251M | 0.44 | 0.35 | 78.23 | 0.27 | 0.14 | 53.02 | 65.63 | 27.49 | 262 |
| V253I | 0.88 | 0.13 | 14.74 | 0.88 | 0.15 | 17.11 | 15.92 | 37.91 | |
| K255Q | 2.57 | 0.88 | 34.03 | 1.83 | 0.56 | 30.70 | 32.36 | 27.87 | |
| K255R | 0.18 | 0.13 | 72.47 | 0.15 | 0.07 | 47.51 | 59.99 | 27.87 | 261 |
| P257K | 0.36 | 0.03 | 7.84 | 0.26 | 0.06 | 21.69 | 14.76 | 39.27 | |
| P257L | 0.50 | 0.09 | 18.95 | 0.38 | 0.09 | 24.57 | 21.76 | 39.27 | |
| P257N | 0.51 | 0.14 | 27.23 | 0.46 | 0.12 | 25.54 | 26.38 | 39.27 | |
| P257R | 1.29 | 0.34 | 26.64 | 0.97 | 0.25 | 26.30 | 26.47 | 39.27 | |
| P257V | 0.63 | 0.25 | 39.24 | 0.46 | 0.20 | 43.44 | 41.34 | 39.27 | |
| D258N | 0.88 | 0.46 | 52.76 | 0.95 | 0.38 | 39.96 | 46.36 | 39.27 | |
| A259E | 0.57 | 0.28 | 48.25 | 0.55 | 0.23 | 42.21 | 45.23 | 39.27 | |
| A259G | 0.69 | 0.28 | 40.49 | 1.65 | 0.73 | 44.17 | 42.33 | 16.82 | |
| A259K | 0.12 | 0.16 | 126.02 | 0.31 | 0.23 | 73.89 | 99.95 | 16.82 | 127 |
| A259P | 2.24 | 0.99 | 44.47 | 4.05 | 3.23 | 79.65 | 62.06 | 16.82 | 344 |
| A259Q | 0.83 | 0.39 | 47.26 | 0.46 | 0.18 | 39.34 | 43.30 | 35.77 | |
| A259S | 1.89 | 0.93 | 49.21 | 1.64 | 0.69 | 42.35 | 45.78 | 40.52 | |
| A259T | 0.15 | 0.07 | 46.23 | 0.35 | 0.08 | 24.14 | 35.18 | 40.52 | |
| A259V | 0.24 | 0.11 | 47.58 | 0.46 | 0.14 | 29.72 | 38.65 | 40.52 | |
| A259W | 0.45 | 0.21 | 47.39 | 0.95 | 0.25 | 26.17 | 36.78 | 40.52 | |
| A259Y | 1.00 | 0.34 | 33.40 | 0.96 | 0.04 | 3.86 | 18.63 | 40.52 | |
| K260A | 0.86 | 0.35 | 41.05 | 0.27 | 0.09 | 31.31 | 36.18 | 40.52 | |
| K260G | 0.14 | 0.10 | 69.60 | 0.21 | 0.07 | 33.41 | 51.50 | 40.52 | 263 |
| K260H | 1.55 | 0.37 | 23.60 | 1.69 | 0.81 | 48.10 | 35.85 | 32.16 | |
| K260L | 0.56 | 0.34 | 61.43 | 2.27 | 0.71 | 31.13 | 46.28 | 40.52 | |
| K260M | 0.15 | 0.20 | 140.69 | 0.46 | 0.30 | 65.57 | 103.13 | 26.52 | 350 |
| K260Q | 0.65 | 0.35 | 53.52 | 0.64 | 0.23 | 36.63 | 45.08 | 37.83 | |
| K260R | 0.96 | 0.50 | 51.53 | 0.99 | 0.44 | 44.35 | 47.94 | 37.83 | |
| K260S | 1.43 | 0.48 | 33.22 | 1.53 | 0.61 | 40.14 | 36.68 | 37.83 | |
| L174W | 1.82 | 2.44 | 134.26 | 1.82 | 1.09 | 60.18 | 97.22 | 20.63 | 117 |
| G027H | 0.44 | 0.27 | 61.92 | 0.56 | 0.39 | 69.63 | 65.78 | 30.98 | 259 |
| S261K | 3.59 | 0.97 | 27.13 | 4.01 | 2.04 | 50.92 | 39.03 | 32.16 | |
| S261M | 1.27 | 0.00 | 0.00 | 0.84 | 0.00 | 0.00 | 0.00 | 27.90 | |
| S261N | 3.89 | 0.00 | 0.00 | 4.47 | 0.73 | 16.33 | 8.16 | 27.90 | |
| S261Q | 2.40 | 0.00 | 0.00 | 1.11 | 0.00 | 0.00 | 0.00 | 27.90 | |
| S261R | 3.86 | 0.00 | 0.00 | 3.28 | 0.00 | 0.00 | 0.00 | 27.90 | |
| S261T | 2.14 | 0.05 | 2.46 | 2.68 | 0.00 | 0.00 | 1.23 | 27.90 | |
| S261V | 2.53 | 0.40 | 15.85 | 1.62 | 0.08 | 4.86 | 10.35 | 27.90 | |
| S261W | 0.26 | 0.00 | 0.00 | 0.40 | 0.00 | 0.00 | 0.00 | 0.00 | |
| L263K | 3.32 | 0.00 | 0.00 | 3.36 | 0.00 | 0.00 | 0.00 | 0.00 | |
| L263M | 0.54 | 0.00 | 0.00 | 0.50 | 0.00 | 0.00 | 0.00 | 0.00 | |
| L263R | 1.65 | 0.00 | 0.00 | 1.98 | 0.00 | 0.00 | 0.00 | 0.00 | |
| L263T | 0.30 | 0.24 | 81.59 | 0.26 | 0.28 | 108.35 | 94.97 | 32.47 | 363 |
| L263V | 0.48 | 0.21 | 43.47 | 0.38 | 0.15 | 40.48 | 41.97 | 35.91 | |
| V265I | 0.22 | 0.14 | 63.70 | 0.25 | 0.13 | 52.11 | 57.90 | 32.29 | 268 |
| T269A | 0.21 | 0.09 | 42.51 | 0.19 | 0.07 | 38.30 | 40.40 | 35.91 | |
| T269D | 0.55 | 0.23 | 40.79 | 0.44 | 0.20 | 46.08 | 43.43 | 27.87 | |
| T269S | 1.40 | 0.59 | 41.79 | 1.03 | 0.33 | 32.14 | 36.96 | 35.91 | |
| I271L | 1.26 | 0.37 | 29.47 | 0.99 | 0.26 | 25.94 | 27.70 | 11.35 | |
| I271V | 0.62 | 0.47 | 77.15 | 0.54 | 1.65 | 308.12 | 192.64 | 32.26 | 77 |
| V272T | 0.60 | 0.25 | 42.01 | 0.60 | 0.26 | 42.77 | 42.39 | 32.26 | |
| F273H | 0.34 | 0.07 | 19.29 | 0.25 | 0.01 | 5.23 | 12.26 | 27.49 | |
| F273Y | 0.23 | 0.06 | 27.03 | 0.18 | 0.05 | 25.20 | 26.12 | 27.49 | |
| T274A | 0.51 | 0.18 | 34.78 | 0.51 | 0.19 | 37.08 | 35.93 | 37.65 | |
| Q276D | 0.58 | 0.30 | 51.03 | 0.55 | 0.27 | 48.05 | 49.54 | 28.26 | |
| Q276E | 0.22 | 0.16 | 69.20 | 0.25 | 0.19 | 75.40 | 72.30 | 37.23 | 226 |
| Q276H | 0.50 | 0.17 | 33.87 | 0.37 | 0.12 | 32.97 | 33.42 | 32.26 | |
| Q276R | 3.03 | 0.94 | 31.02 | 2.20 | 0.62 | 28.07 | 29.54 | 35.77 | |
| Q276S | 0.47 | 0.21 | 44.61 | 0.52 | 0.17 | 33.40 | 39.00 | 28.26 | |
| Q155D | 0.87 | 0.63 | 72.62 | 0.94 | 0.53 | 56.55 | 64.59 | 34.46 | 272 |
| L144G | 0.28 | 0.19 | 68.05 | 0.24 | 0.17 | 70.19 | 69.12 | 28.04 | 215 |
| V277E | 0.78 | 0.58 | 73.86 | 0.69 | 0.32 | 45.99 | 59.93 | 32.26 | 273 |
| V277H | 2.85 | 1.20 | 42.00 | 3.17 | 2.11 | 66.44 | 54.22 | 22.57 | 274 |
| V277K | 4.72 | 1.49 | 31.56 | 3.90 | 1.32 | 33.82 | 32.69 | 22.57 | |
| V277M | 0.56 | 0.21 | 36.67 | 0.48 | 0.17 | 34.86 | 35.77 | 22.57 | |
| V277N | 1.44 | 0.53 | 36.37 | 1.50 | 0.52 | 34.40 | 35.38 | 22.57 | |
| V277Q | 1.08 | 0.44 | 40.84 | 1.05 | 0.41 | 39.25 | 40.04 | 22.57 | |
| V277R | 0.20 | 0.09 | 45.91 | 0.18 | 0.08 | 43.36 | 44.63 | 22.57 | |
| V277S | 1.85 | 0.57 | 30.90 | 1.86 | 0.54 | 28.82 | 29.86 | 22.57 | |
| V277Y | 0.85 | 0.29 | 34.22 | 0.78 | 0.25 | 31.77 | 32.99 | 35.48 | |
| L278A | 0.67 | 0.36 | 54.36 | 0.78 | 0.31 | 39.25 | 46.80 | 37.65 | |
| L278E | 0.48 | 0.26 | 53.40 | 0.59 | 0.28 | 46.41 | 49.90 | 26.56 | |
| L278F | 1.01 | 0.41 | 40.07 | 0.98 | 0.36 | 36.35 | 38.21 | 26.56 | |
| L278G | 0.92 | 0.45 | 48.75 | 0.90 | 0.46 | 51.44 | 50.09 | 37.65 | 275 |
| L278H | 0.18 | 0.09 | 48.36 | 0.16 | 0.10 | 59.38 | 53.87 | 40.67 | 276 |
| L278K | 0.44 | 0.27 | 62.36 | 0.58 | 0.27 | 47.14 | 54.75 | 40.67 | 277 |
| L278N | 0.75 | 0.50 | 67.04 | 0.71 | 0.46 | 65.32 | 66.18 | 40.67 | 255 |
| L278S | 1.14 | 0.56 | 49.25 | 1.39 | 0.48 | 34.38 | 41.81 | 26.56 | |
| L278T | 1.70 | 0.67 | 39.30 | 1.62 | 0.59 | 36.51 | 37.91 | 35.48 | |
| L278Y | 0.49 | 0.18 | 36.80 | 0.38 | 0.15 | 40.29 | 38.55 | 40.67 | |
| K279A | 0.23 | 0.09 | 40.52 | 0.23 | 0.07 | 32.32 | 36.42 | 35.48 | |
| K279R | 0.88 | 0.32 | 36.44 | 0.90 | 0.27 | 30.57 | 33.50 | 26.56 | |
| S282D | 0.68 | 0.22 | 32.40 | 0.52 | 0.18 | 35.63 | 34.01 | 35.77 | |
| S282G | 2.84 | 2.20 | 77.52 | 2.30 | 0.83 | 36.14 | 56.83 | 40.67 | 279 |
| S282Q | 0.29 | 0.15 | 51.37 | 0.30 | 0.24 | 81.01 | 66.19 | 41.91 | 228 |
| Q283E | 0.85 | 0.38 | 44.84 | 1.09 | 0.34 | 31.24 | 38.04 | 41.91 | |
| N141Y | 0.21 | 0.25 | 121.79 | 0.22 | 0.22 | 100.00 | 110.90 | 36.07 | 164 |
| D284E | 1.09 | 0.20 | 18.42 | 1.06 | 0.17 | 15.59 | 17.01 | 14.90 | |
| D284Q | 0.41 | 0.57 | 138.22 | 0.46 | 0.49 | 106.00 | 122.11 | 37.53 | 96 |
| V277C | 0.24 | 0.38 | 161.89 | 0.22 | 0.41 | 185.26 | 173.58 | 37.53 | 130 |
| E285F | 0.47 | 0.21 | 44.68 | 0.46 | 0.19 | 40.90 | 42.79 | 16.94 | |
| E285H | 0.47 | 0.10 | 20.89 | 0.14 | 0.07 | 50.36 | 35.62 | 14.90 | |
| E285M | 0.29 | 0.20 | 67.13 | 0.36 | 0.22 | 61.33 | 64.23 | 24.30 | 156 |
| E285Q | 0.27 | 0.14 | 51.48 | 0.31 | 0.15 | 46.57 | 49.02 | 37.88 | |
| E285Y | 0.83 | 0.48 | 57.81 | 1.18 | 0.53 | 44.74 | 51.27 | 24.30 | 285 |
| Y288W | 0.41 | 0.07 | 17.73 | 0.58 | 0.15 | 26.36 | 22.05 | 29.23 | |
| F290I | 0.34 | 0.15 | 45.54 | 0.25 | 0.07 | 28.31 | 36.92 | 18.00 | |
| F290M | 0.41 | 0.21 | 51.41 | 0.37 | 0.19 | 51.44 | 51.42 | 18.12 | 286 |
| G291S | 4.95 | 1.80 | 36.27 | 3.69 | 1.66 | 44.96 | 40.62 | 23.75 | |
| G291V | 2.96 | 0.95 | 32.10 | 2.31 | 0.78 | 33.86 | 32.98 | 23.75 | |
| E292A | 3.34 | 1.44 | 43.12 | 2.97 | 1.34 | 45.12 | 44.12 | 23.75 | |
| E292C | 1.98 | 0.73 | 36.73 | 1.80 | 0.62 | 34.46 | 35.59 | 23.75 | |
| E292F | 1.14 | 0.48 | 41.65 | 1.45 | 0.52 | 36.03 | 38.84 | 23.75 | |
| E292G | 2.53 | 0.58 | 23.00 | 2.16 | 0.75 | 34.79 | 28.89 | 23.75 | |
| E292N | 2.34 | 1.02 | 43.39 | 2.08 | 0.72 | 34.74 | 39.06 | 23.75 | |
| E292P | 3.30 | 1.22 | 36.99 | 5.31 | 3.29 | 61.99 | 49.49 | 23.75 | |
| E292V | 1.53 | 0.98 | 64.31 | 2.05 | 2.11 | 103.15 | 83.73 | 36.18 | 184 |
| T293A | 1.45 | 0.53 | 36.42 | 1.21 | 0.40 | 32.91 | 34.66 | 40.64 | |
| I301A | 1.63 | 0.41 | 24.93 | 1.20 | 0.31 | 25.59 | 25.26 | 31.06 | |
| I301V | 2.14 | 0.67 | 31.52 | 1.92 | 0.48 | 25.07 | 28.29 | 31.06 | |
| G305D | 0.75 | 0.40 | 53.69 | 0.92 | 0.44 | 47.63 | 50.66 | 24.30 | 288 |
| G305E | 1.29 | 0.30 | 23.10 | 1.94 | 0.55 | 28.35 | 25.72 | 29.23 | |
| G305N | 0.23 | 0.20 | 86.27 | 0.31 | 0.18 | 55.89 | 71.08 | 24.30 | 157 |
| V102H | 0.27 | 0.17 | 61.76 | 0.45 | 0.33 | 73.70 | 67.73 | 24.78 | 316 |
| T306E | 0.71 | 0.29 | 41.27 | 0.88 | 0.46 | 51.76 | 46.51 | 32.76 | |
| T306S | 2.25 | 0.78 | 34.72 | 2.50 | 1.19 | 47.66 | 41.19 | 32.76 | |
| L307G | 0.79 | 0.36 | 46.11 | 0.69 | 0.26 | 38.07 | 42.09 | 35.77 | |
| L307N | 3.35 | 1.29 | 38.46 | 2.38 | 0.86 | 36.03 | 37.24 | 17.30 | |
| L307S | 1.48 | 0.57 | 38.21 | 1.37 | 0.50 | 36.28 | 37.25 | 35.77 | |
| L307T | 3.56 | 1.74 | 48.73 | 2.52 | 0.88 | 34.88 | 41.80 | 17.30 | |
| L307W | 1.62 | 0.46 | 28.40 | 0.71 | 0.25 | 34.48 | 31.44 | 17.30 | |
| S308G | 1.52 | 0.41 | 27.07 | 1.20 | 0.23 | 19.46 | 23.26 | 17.30 | |
| S308H | 0.41 | 0.06 | 15.52 | 0.27 | 0.07 | 24.35 | 19.93 | 21.52 | |
| S308K | 1.09 | 0.21 | 19.37 | 1.23 | 0.22 | 18.19 | 18.78 | 21.52 | |
| S308N | 1.49 | 0.38 | 25.68 | 1.66 | 0.41 | 24.57 | 25.13 | 21.52 | |
| S308R | 0.57 | 0.12 | 20.30 | 0.63 | 0.12 | 18.76 | 19.53 | 21.52 | |
| S308T | 1.25 | 0.41 | 32.91 | 1.35 | 0.54 | 39.96 | 36.43 | 32.12 | |
| I309E | 2.92 | 1.66 | 56.92 | 2.82 | 1.43 | 50.69 | 53.81 | 32.12 | 291 |
| I309G | 3.20 | 1.50 | 46.79 | 4.15 | 1.24 | 29.75 | 38.27 | 32.12 | |
| I309H | 0.43 | 0.23 | 53.50 | 0.37 | 0.21 | 56.15 | 54.82 | 32.12 | 292 |
| I309K | 2.23 | 0.50 | 22.50 | 2.06 | 0.45 | 22.04 | 22.27 | 32.12 | |
| I309L | 0.50 | 0.28 | 57.03 | 0.42 | 0.20 | 47.42 | 52.22 | 32.12 | 293 |
| I309M | 2.38 | 0.97 | 40.62 | 2.28 | 0.81 | 35.61 | 38.12 | 32.12 | |
| I309N | 5.77 | 1.54 | 26.60 | 6.49 | 1.75 | 27.00 | 26.80 | 29.86 | |
| I309Q | 1.54 | 0.71 | 46.49 | 1.37 | 0.52 | 38.06 | 42.27 | 35.48 | |
| I309S | 2.69 | 1.14 | 42.51 | 1.93 | 0.72 | 37.08 | 39.80 | 35.77 | |
| I309T | 2.81 | 0.77 | 27.43 | 2.86 | 0.62 | 21.80 | 24.62 | 29.86 | |
| I309V | 0.73 | 0.25 | 34.55 | 0.91 | 0.23 | 25.42 | 29.99 | 29.86 | |
| M310A | 5.23 | 2.88 | 55.00 | 3.97 | 1.52 | 38.24 | 46.62 | 18.00 | |
| M310F | 1.88 | 0.77 | 41.23 | 1.73 | 0.79 | 45.70 | 43.46 | 27.54 | |
| M310G | 0.80 | 0.26 | 32.63 | 0.64 | 0.21 | 32.71 | 32.67 | 18.12 | |
| M310Q | 0.41 | 0.30 | 73.59 | 0.38 | 0.14 | 37.72 | 55.65 | 18.00 | 294 |
| M310R | 0.45 | 0.34 | 74.70 | 0.58 | 0.39 | 66.55 | 70.62 | 27.54 | 216 |
| M310R | 0.33 | 0.24 | 72.45 | 0.32 | 0.23 | 72.44 | 72.45 | 26.52 | 216 |
| M310V | 0.45 | 0.12 | 26.15 | 0.34 | 0.04 | 12.20 | 19.18 | 18.12 | |
| D034W | 0.21 | 0.08 | 38.57 | 0.16 | 0.16 | 95.98 | 67.27 | 23.34 | 382 |
| R311H | 0.49 | 0.23 | 47.42 | 0.56 | 0.26 | 47.03 | 47.23 | 24.30 | |
| R311K | 0.43 | 0.28 | 65.85 | 0.27 | 0.11 | 39.44 | 52.64 | 48.62 | 298 |
| R311Q | 0.81 | 0.43 | 52.28 | 0.52 | 0.20 | 38.67 | 45.47 | 48.62 | |
| R311S | 0.36 | 0.21 | 57.54 | 0.25 | 0.10 | 39.80 | 48.67 | 48.62 | |
| S312K | 0.61 | 0.30 | 49.39 | 0.61 | 0.26 | 43.04 | 46.22 | 32.29 | |
| S312N | 1.80 | 0.76 | 42.25 | 2.62 | 0.80 | 30.63 | 36.44 | 32.29 | |
| S312T | 1.76 | 0.37 | 21.07 | 1.48 | 0.28 | 19.07 | 20.07 | 29.86 | |
| M313A | 0.53 | 0.17 | 32.60 | 0.51 | 0.14 | 27.09 | 29.85 | 29.86 | |
| M313E | 0.67 | 0.19 | 28.68 | 0.84 | 0.20 | 23.66 | 26.17 | 21.52 | |
| M313H | 0.71 | 0.19 | 27.03 | 0.64 | 0.14 | 21.49 | 24.26 | 21.52 | |
| M313K | 7.00 | 3.27 | 46.72 | 5.21 | 1.60 | 30.60 | 38.66 | 29.86 | |
| M313L | 0.98 | 0.26 | 26.98 | 1.34 | 0.60 | 44.47 | 35.72 | 26.64 | |
| M313P | 1.21 | 0.29 | 24.39 | 0.90 | 0.23 | 25.51 | 24.95 | 26.64 | |
| M313R | 0.74 | 0.18 | 24.88 | 0.63 | 0.11 | 17.13 | 21.00 | 26.64 | |
| M313S | 1.23 | 0.30 | 24.22 | 1.26 | 0.29 | 22.95 | 23.59 | 21.52 | |
| M313T | 1.79 | 0.50 | 28.07 | 2.20 | 0.46 | 20.93 | 24.50 | 21.52 | |
| M313V | 0.64 | 0.14 | 21.26 | 0.59 | 0.09 | 15.37 | 18.32 | 26.64 | |
| M313Y | 0.93 | 0.24 | 25.68 | 0.83 | 0.26 | 31.26 | 28.47 | 24.88 | |
| K314A | 0.71 | 0.22 | 30.86 | 0.75 | 0.17 | 22.41 | 26.63 | 24.88 | |
| K314D | 1.22 | 0.26 | 21.33 | 0.66 | 0.27 | 41.21 | 31.27 | 24.53 | |
| K314H | 0.82 | 0.19 | 22.69 | 0.88 | 0.23 | 26.57 | 24.63 | 24.88 | |
| K314Q | 1.62 | 0.33 | 20.41 | 1.42 | 0.63 | 44.38 | 32.40 | 32.16 | |
| K314R | 0.39 | 0.14 | 34.85 | 0.41 | 0.14 | 34.85 | 34.85 | 24.53 | |
| K314S | 1.98 | 0.74 | 37.48 | 1.32 | 0.36 | 27.45 | 32.47 | 35.77 | |
| S315A | 1.01 | 0.19 | 18.60 | 0.88 | 0.19 | 21.88 | 20.24 | 24.53 | |
| S315E | 0.23 | 0.08 | 33.41 | 0.19 | 0.05 | 26.74 | 30.07 | 24.53 | |
| S315H | 1.92 | 0.47 | 24.32 | 1.88 | 0.41 | 21.79 | 23.06 | 24.53 | |
| S315R | 1.29 | 0.39 | 29.93 | 1.03 | 0.36 | 35.28 | 32.60 | 24.53 | |
| F380L | 0.37 | 0.25 | 68.26 | 0.65 | 0.60 | 91.82 | 80.04 | 31.91 | 191 |
| L317A | 4.33 | 1.78 | 41.11 | 5.13 | 2.48 | 48.36 | 44.74 | 21.73 | |
| L317D | 0.20 | 0.10 | 47.06 | 0.44 | 0.15 | 33.71 | 40.39 | 21.73 | |
| L317H | 0.72 | 0.28 | 39.28 | 0.78 | 0.28 | 36.25 | 37.77 | 21.73 | |
| L317K | 2.81 | 1.09 | 38.73 | 3.91 | 1.29 | 32.91 | 35.82 | 21.73 | |
| L317N | 0.63 | 0.50 | 79.05 | 0.43 | 0.22 | 51.35 | 65.20 | 35.77 | 266 |
| L317Q | 4.95 | 1.42 | 28.62 | 4.37 | 1.55 | 35.42 | 32.02 | 35.35 | |
| L317R | 0.23 | 0.08 | 33.76 | 0.25 | 0.08 | 30.30 | 32.03 | 21.73 | |
| L317S | 2.67 | 0.96 | 35.90 | 2.48 | 0.82 | 32.90 | 34.40 | 35.35 | |
| L317T | 0.99 | 0.36 | 36.57 | 1.08 | 0.45 | 41.38 | 38.98 | 21.73 | |
| L318D | 0.76 | 0.29 | 37.62 | 0.68 | 0.18 | 26.05 | 31.83 | 40.64 | |
| L318I | 0.84 | 0.26 | 30.78 | 0.92 | 0.24 | 26.19 | 28.48 | 24.88 | |
| L318K | 0.72 | 0.48 | 66.76 | 0.68 | 0.32 | 46.84 | 56.80 | 35.42 | 301 |
| L318M | 0.37 | 0.23 | 61.58 | 0.36 | 0.20 | 56.16 | 58.87 | 35.42 | 302 |
| L318N | 0.86 | 0.49 | 57.45 | 0.70 | 0.38 | 54.96 | 56.21 | 35.42 | 303 |
| L318Q | 0.61 | 0.32 | 52.57 | 0.51 | 0.30 | 58.75 | 55.66 | 35.42 | 304 |
| L318S | 0.42 | 0.17 | 41.53 | 0.51 | 0.18 | 35.53 | 38.53 | 24.88 | |
| L318T | 0.63 | 0.15 | 23.67 | 0.59 | 0.12 | 19.51 | 21.59 | 40.64 | |
| D320E | 1.83 | 0.98 | 53.87 | 1.40 | 0.61 | 43.36 | 48.61 | 21.17 | |
| D320G | 1.16 | 0.22 | 18.74 | 0.88 | 0.17 | 19.09 | 18.91 | 40.64 | |
| D320H | 3.12 | 1.49 | 47.61 | 1.65 | 0.54 | 32.65 | 40.13 | 48.62 | |
| D320I | 1.28 | 0.39 | 30.80 | 1.24 | 0.37 | 30.02 | 30.41 | 40.64 | |
| D320K | 0.39 | 0.18 | 47.28 | 0.38 | 0.11 | 30.32 | 38.80 | 35.48 | |
| D320L | 0.36 | 0.16 | 44.62 | 0.38 | 0.13 | 34.21 | 39.41 | 21.17 | |
| D320M | 1.37 | 0.51 | 36.78 | 1.67 | 0.42 | 25.37 | 31.08 | 32.29 | |
| D320R | 4.11 | 2.64 | 64.27 | 2.08 | 1.13 | 54.42 | 59.34 | 48.62 | 305 |
| D320S | 1.76 | 0.69 | 39.30 | 1.43 | 0.45 | 31.22 | 35.26 | 21.17 | |
| D320V | 0.75 | 0.20 | 26.91 | 0.60 | 0.17 | 28.25 | 27.58 | 35.35 | |
| D320W | 0.32 | 0.09 | 29.02 | 0.33 | 0.08 | 25.61 | 27.31 | 37.77 | |
| D320Y | 0.61 | 0.23 | 37.61 | 0.56 | 0.12 | 22.21 | 29.91 | 21.17 | |
| N321A | 0.21 | 0.17 | 78.12 | 0.27 | 0.16 | 60.26 | 69.19 | 35.42 | 253 |
| N321H | 0.24 | 0.16 | 65.14 | 0.14 | 0.06 | 42.14 | 53.64 | 35.42 | 307 |
| N321R | 0.28 | 0.22 | 79.89 | 0.29 | 0.15 | 52.94 | 66.42 | 32.56 | 240 |
| N321S | 0.49 | 0.14 | 29.63 | 0.46 | 0.08 | 16.81 | 23.22 | 37.03 | |
| M323I | 0.69 | 0.13 | 19.25 | 0.71 | 0.13 | 18.36 | 18.80 | 37.03 | |
| M323L | 0.75 | 0.26 | 35.39 | 0.85 | 0.25 | 30.05 | 32.72 | 24.88 | |
| E324A | 0.48 | 0.24 | 49.84 | 0.45 | 0.13 | 28.13 | 38.99 | 32.56 | |
| E324D | 2.77 | 0.79 | 28.66 | 2.55 | 0.75 | 29.49 | 29.07 | 35.35 | |
| E324N | 1.57 | 0.69 | 44.27 | 1.54 | 0.59 | 38.35 | 41.31 | 32.56 | |
| E324R | 3.88 | 1.67 | 42.92 | 3.64 | 1.41 | 38.63 | 40.78 | 32.56 | |
| E324S | 1.13 | 0.38 | 33.75 | 1.32 | 0.44 | 32.97 | 33.36 | 24.88 | |
| T325E | 0.89 | 0.26 | 28.68 | 0.80 | 0.18 | 21.88 | 25.28 | 37.03 | |
| T325K | 1.56 | 0.48 | 30.76 | 1.55 | 0.58 | 37.17 | 33.96 | 20.98 | |
| T325N | 0.72 | 0.29 | 40.13 | 0.92 | 0.35 | 37.56 | 38.84 | 32.33 | |
| T325Q | 0.82 | 0.35 | 42.61 | 0.81 | 0.26 | 31.65 | 37.13 | 20.98 | |
| I326V | 1.49 | 0.57 | 38.48 | 2.01 | 0.62 | 31.02 | 34.75 | 32.33 | |
| L327M | 0.51 | 0.14 | 27.25 | 0.55 | 0.16 | 28.73 | 27.99 | 32.33 | |
| N328A | 0.70 | 0.34 | 47.97 | 0.67 | 0.27 | 40.37 | 44.17 | 32.33 | |
| N328C | 0.97 | 0.36 | 37.10 | 0.89 | 0.30 | 33.35 | 35.22 | 32.33 | |
| N328H | 0.61 | 0.20 | 33.20 | 0.72 | 0.29 | 39.54 | 36.37 | 20.98 | |
| N328I | 0.37 | 0.16 | 41.94 | 0.30 | 0.14 | 48.32 | 45.13 | 32.33 | |
| N328K | 1.36 | 0.52 | 38.20 | 1.48 | 0.55 | 37.42 | 37.81 | 20.98 | |
| N328L | 0.19 | 0.14 | 71.98 | 0.21 | 0.11 | 50.97 | 61.47 | 36.41 | 211 |
| N328Q | 0.76 | 0.35 | 46.23 | 0.68 | 0.21 | 30.49 | 38.36 | 35.48 | |
| N328R | 0.13 | 0.13 | 100.00 | 0.17 | 0.10 | 56.40 | 78.20 | 36.41 | 212 |
| N328T | 0.61 | 0.18 | 30.29 | 0.63 | 0.20 | 31.20 | 30.74 | 20.98 | |
| N328V | 0.76 | 0.25 | 33.33 | 0.79 | 0.22 | 27.74 | 30.54 | 20.98 | |
| N328Y | 1.39 | 0.46 | 32.79 | 1.30 | 0.35 | 26.96 | 29.88 | 20.98 | |
| I331V | 0.28 | 0.10 | 34.23 | 0.29 | 0.07 | 23.16 | 28.70 | 35.35 | |
| V334T | 0.43 | 0.10 | 22.83 | 0.36 | 0.06 | 17.79 | 20.31 | 21.17 | |
| K339M | 1.07 | 0.18 | 17.27 | 1.00 | 0.20 | 20.20 | 18.73 | 1.44 | |
| S342A | 1.93 | 1.99 | 103.00 | 1.69 | 2.09 | 124.13 | 113.57 | 1.44 | 97 |
| Q343V | 0.22 | 0.12 | 52.83 | 0.26 | 0.13 | 49.02 | 50.93 | 32.29 | 312 |
| Q347A | 2.18 | 0.92 | 41.96 | 2.60 | 0.72 | 27.87 | 34.91 | 35.35 | |
| Q347E | 6.15 | 0.97 | 15.81 | 5.59 | 2.75 | 49.28 | 32.54 | 7.03 | |
| Q347G | 2.76 | 1.01 | 36.48 | 2.89 | 0.81 | 28.14 | 32.31 | 35.35 | |
| Q347M | 1.86 | 0.35 | 18.91 | 3.77 | 1.15 | 30.39 | 24.65 | 7.03 | |
| Q347R | 1.76 | 0.40 | 22.66 | 2.56 | 0.45 | 17.40 | 20.03 | 7.03 | |
| Q347S | 2.62 | 0.34 | 13.01 | 3.51 | 0.55 | 15.77 | 14.39 | 7.03 | |
| E348D | 0.39 | 0.20 | 52.33 | 0.48 | 0.17 | 35.83 | 44.08 | 37.91 | |
| E348G | 1.65 | 0.33 | 20.00 | 1.69 | 0.34 | 20.32 | 20.16 | 7.03 | |
| E348S | 2.06 | 0.30 | 14.42 | 2.92 | 0.39 | 13.17 | 13.80 | 7.03 | |
| Q349A | 0.30 | 0.15 | 51.09 | 0.27 | 0.14 | 52.13 | 51.61 | 29.57 | 313 |
| Q349E | 0.27 | 0.16 | 58.75 | 0.33 | 0.14 | 41.85 | 50.30 | 29.57 | 314 |
| Q349K | 6.42 | 0.76 | 11.77 | 8.49 | 1.75 | 20.58 | 16.18 | 7.03 | |
| Q349M | 0.58 | 0.23 | 39.10 | 0.62 | 0.20 | 32.69 | 35.89 | 29.57 | |
| Q349R | 4.63 | 2.34 | 50.44 | 3.45 | 1.45 | 42.07 | 46.25 | 28.68 | |
| Q349T | 0.37 | 0.16 | 43.57 | 0.40 | 0.15 | 36.86 | 40.21 | 29.57 | |
| V351A | 3.22 | 1.43 | 44.33 | 2.63 | 0.77 | 29.43 | 36.88 | 28.68 | |
| V351C | 0.22 | 0.11 | 52.28 | 0.23 | 0.11 | 47.11 | 49.70 | 29.57 | |
| V351S | 1.17 | 0.59 | 50.19 | 1.02 | 0.32 | 31.76 | 40.98 | 28.68 | |
| I353T | 0.69 | 0.36 | 51.44 | 0.71 | 0.23 | 32.91 | 42.18 | 28.68 | |
| I353V | 4.90 | 2.29 | 46.67 | 2.94 | 0.99 | 33.61 | 40.14 | 28.68 | |
| N356D | 1.98 | 0.84 | 42.23 | 1.42 | 0.42 | 29.96 | 36.09 | 28.68 | |
| N356H | 2.24 | 0.73 | 32.60 | 2.09 | 0.69 | 33.15 | 32.88 | 28.68 | |
| S359D | 0.33 | 0.11 | 33.59 | 0.38 | 0.09 | 23.67 | 28.63 | 37.03 | |
| S359E | 3.20 | 2.11 | 65.89 | 2.23 | 0.92 | 41.15 | 53.52 | 28.68 | 315 |
| S359T | 0.84 | 0.41 | 48.57 | 0.83 | 0.30 | 35.75 | 42.16 | 37.18 | |
| S360T | 0.89 | 0.27 | 30.81 | 0.83 | 0.24 | 29.20 | 30.00 | 35.71 | |
| P367A | 0.54 | 0.13 | 24.21 | 0.46 | 0.10 | 21.82 | 23.02 | 37.03 | |
| P367G | 0.88 | 0.28 | 31.84 | 0.88 | 0.27 | 30.46 | 31.15 | 37.18 | |
| P367S | 1.66 | 0.48 | 29.07 | 1.61 | 0.42 | 26.02 | 27.55 | 35.71 | |
| D368A | 1.78 | 0.80 | 44.95 | 1.85 | 0.56 | 30.47 | 37.71 | 37.18 | |
| D368E | 2.15 | 0.84 | 38.96 | 1.86 | 0.64 | 34.51 | 36.73 | 37.18 | |
| D368H | 0.24 | 0.15 | 61.55 | 0.21 | 0.13 | 59.29 | 60.42 | 37.18 | 282 |
| D368K | 0.16 | 0.17 | 108.75 | 0.17 | 0.08 | 45.13 | 76.94 | 37.18 | 283 |
| D368L | 0.90 | 0.31 | 34.93 | 0.87 | 0.27 | 31.36 | 33.15 | 37.18 | |
| D368R | 1.74 | 0.59 | 33.76 | 2.38 | 1.08 | 45.43 | 39.59 | 30.11 | |
| D368T | 1.03 | 0.37 | 35.56 | 1.24 | 0.33 | 26.24 | 30.90 | 30.11 | |
| V058K | 14.14 | 8.25 | 58.34 | 6.88 | 4.25 | 61.77 | 60.06 | 11.45 | 383 |
| N369R | 2.93 | 0.86 | 29.31 | 2.62 | 0.75 | 28.66 | 28.98 | 35.71 | |
| N369S | 2.05 | 0.48 | 23.29 | 3.02 | 1.51 | 49.95 | 36.62 | 32.16 | |
| A371C | 0.38 | 0.12 | 31.79 | 0.33 | 0.10 | 30.94 | 31.36 | 19.08 | |
| A371E | 1.41 | 1.00 | 70.86 | 1.11 | 0.48 | 43.11 | 56.99 | 39.44 | 319 |
| A371F | 0.15 | 0.09 | 62.29 | 0.21 | 0.15 | 67.60 | 64.94 | 38.36 | 139 |
| A371G | 0.49 | 0.13 | 25.77 | 0.56 | 0.20 | 36.12 | 30.94 | 27.64 | |
| A371H | 0.64 | 0.25 | 38.25 | 0.77 | 0.24 | 31.66 | 34.95 | 27.64 | |
| A371I | 0.96 | 0.35 | 36.21 | 0.93 | 0.35 | 37.44 | 36.82 | 39.44 | |
| A371K | 0.83 | 0.32 | 37.79 | 0.78 | 0.26 | 33.42 | 35.61 | 27.64 | |
| A371L | 0.43 | 0.07 | 15.54 | 0.50 | 0.07 | 14.86 | 15.20 | 35.71 | |
| A371L | 0.48 | 0.16 | 32.95 | 0.53 | 0.16 | 30.92 | 31.94 | 27.64 | |
| A371M | 0.79 | 0.47 | 59.82 | 0.71 | 0.35 | 49.93 | 54.88 | 35.71 | 321 |
| A371R | 0.86 | 0.42 | 48.51 | 0.92 | 0.40 | 43.35 | 45.93 | 39.44 | |
| A371S | 0.66 | 0.25 | 38.44 | 0.72 | 0.30 | 41.65 | 40.04 | 39.44 | |
| A371T | 0.34 | 0.18 | 53.34 | 0.20 | 0.12 | 59.46 | 56.40 | 37.23 | 322 |
| A371V | 0.83 | 0.26 | 30.97 | 1.00 | 0.26 | 25.74 | 28.35 | 39.44 | |
| Q373A | 0.72 | 0.16 | 22.25 | 0.66 | 0.18 | 27.32 | 24.79 | 19.08 | |
| Q373E | 2.39 | 0.28 | 11.49 | 3.70 | 1.34 | 36.26 | 23.88 | 39.44 | |
| Q373F | 0.54 | 0.20 | 37.44 | 0.57 | 0.19 | 34.04 | 35.74 | 27.64 | |
| Q373K | 0.98 | 0.37 | 37.77 | 0.95 | 0.31 | 32.37 | 35.07 | 27.64 | |
| Q373R | 0.51 | 0.16 | 30.78 | 0.44 | 0.24 | 55.25 | 43.01 | 28.92 | |
| Q373S | 0.23 | 0.12 | 52.88 | 0.23 | 0.22 | 96.90 | 74.89 | 28.92 | 214 |
| Q373V | 1.55 | 0.55 | 35.47 | 1.55 | 0.59 | 38.08 | 36.77 | 28.92 | |
| L374A | 0.39 | 0.28 | 70.56 | 0.79 | 0.30 | 37.37 | 53.96 | 28.92 | 324 |
| L374H | 1.17 | 0.41 | 35.21 | 1.27 | 0.41 | 32.06 | 33.63 | 27.64 | |
| L374I | 1.01 | 0.29 | 28.98 | 1.08 | 0.30 | 28.16 | 28.57 | 37.41 | |
| L374M | 1.22 | 0.52 | 42.66 | 1.21 | 0.46 | 37.95 | 40.31 | 27.64 | |
| L374N | 0.65 | 0.20 | 31.16 | 0.74 | 0.20 | 27.38 | 29.27 | 37.41 | |
| L374P | 0.56 | 0.15 | 27.74 | 0.61 | 0.17 | 27.30 | 27.52 | 37.41 | |
| L374R | 0.30 | 0.15 | 48.59 | 0.30 | 0.12 | 39.83 | 44.21 | 37.41 | |
| L374S | 0.56 | 0.24 | 41.87 | 0.63 | 0.19 | 30.18 | 36.02 | 37.41 | |
| L374T | 0.36 | 0.11 | 29.89 | 0.37 | 0.10 | 27.41 | 28.65 | 37.41 | |
| L374V | 0.19 | 0.13 | 65.71 | 0.23 | 0.10 | 42.42 | 54.07 | 37.41 | 325 |
| L374W | 0.63 | 0.20 | 31.65 | 0.74 | 0.18 | 24.73 | 28.19 | 27.20 | |
| L374Y | 1.66 | 0.46 | 27.62 | 1.92 | 0.56 | 29.12 | 28.37 | 27.20 | |
| E375G | 1.85 | 0.61 | 32.88 | 2.04 | 0.53 | 25.80 | 29.34 | 30.11 | |
| E375I | 0.29 | 0.12 | 41.98 | 0.28 | 0.09 | 32.01 | 36.99 | 19.08 | |
| E375L | 0.87 | 0.31 | 34.88 | 0.91 | 0.24 | 26.70 | 30.79 | 30.11 | |
| E375M | 0.87 | 0.30 | 34.97 | 0.84 | 0.23 | 27.56 | 31.27 | 30.11 | |
| E375N | 1.46 | 0.49 | 33.28 | 1.49 | 0.43 | 28.95 | 31.11 | 30.11 | |
| E375R | 1.56 | 0.39 | 25.28 | 1.65 | 0.33 | 19.83 | 22.56 | 35.71 | |
| E375S | 0.66 | 0.25 | 37.57 | 0.82 | 0.13 | 16.21 | 26.89 | 30.11 | |
| E375T | 3.73 | 1.99 | 53.47 | 3.41 | 2.09 | 61.19 | 57.33 | 30.11 | 326 |
| K376A | 1.15 | 0.30 | 26.41 | 1.77 | 0.57 | 31.89 | 29.15 | 29.20 | |
| K376D | 1.71 | 0.45 | 26.05 | 2.01 | 0.44 | 22.03 | 24.04 | 29.20 | |
| K376E | 2.17 | 0.61 | 28.10 | 2.56 | 0.52 | 20.09 | 24.09 | 29.20 | |
| K376Q | 1.18 | 0.26 | 22.10 | 1.33 | 0.30 | 22.34 | 22.22 | 29.20 | |
| K376R | 0.93 | 0.20 | 21.30 | 0.94 | 0.15 | 16.27 | 18.78 | 29.20 | |
| K376S | 1.11 | 0.24 | 21.48 | 0.96 | 0.16 | 16.89 | 19.19 | 29.20 | |
| K376T | 1.40 | 0.25 | 17.58 | 1.59 | 0.29 | 18.38 | 17.98 | 29.20 | |
| K376Y | 1.55 | 0.81 | 51.93 | 1.56 | 0.88 | 56.60 | 54.27 | 27.93 | 327 |
| G377D | 3.19 | 1.26 | 39.34 | 3.90 | 1.40 | 35.87 | 37.60 | 27.93 | |
| G377E | 1.24 | 0.43 | 35.03 | 1.53 | 0.40 | 26.02 | 30.53 | 27.93 | |
| G377H | 1.52 | 0.49 | 32.45 | 1.55 | 0.51 | 33.05 | 32.75 | 27.93 | |
| G377K | 1.95 | 0.63 | 32.52 | 1.80 | 0.59 | 32.87 | 32.70 | 27.93 | |
| G377P | 0.81 | 0.21 | 26.05 | 0.82 | 0.28 | 33.96 | 30.01 | 27.93 | |
| G377R | 2.83 | 0.99 | 35.07 | 3.02 | 0.91 | 30.00 | 32.53 | 27.93 | |
| G377S | 6.11 | 2.61 | 42.74 | 6.73 | 2.55 | 37.91 | 40.32 | 27.93 | |
| G377T | 6.31 | 5.13 | 81.24 | 4.15 | 2.02 | 48.79 | 65.01 | 30.28 | 270 |
| G378K | 1.04 | 0.34 | 33.16 | 1.34 | 0.75 | 56.00 | 44.58 | 30.28 | |
| G378R | 2.10 | 0.62 | 29.46 | 2.65 | 1.02 | 38.40 | 33.93 | 30.28 | |
| K379H | 1.49 | 1.54 | 103.18 | 4.72 | 4.14 | 87.65 | 95.42 | 31.91 | 118 |
| K379R | 0.13 | 0.06 | 44.19 | 0.15 | 0.01 | 8.50 | 26.35 | 35.71 | |
| K379S | 0.35 | 0.26 | 73.32 | 0.73 | 1.13 | 155.75 | 114.54 | 31.91 | 187 |
| K379T | 0.57 | 0.35 | 61.16 | 1.18 | 1.27 | 107.72 | 84.44 | 31.91 | 178 |
| F380I | 0.41 | 0.27 | 66.18 | 0.98 | 0.91 | 93.03 | 79.60 | 31.91 | 193 |
| L165F | 1.40 | 1.23 | 88.06 | 1.29 | 1.09 | 84.44 | 86.25 | 24.02 | 171 |
| F380P | 0.39 | 0.30 | 75.10 | 0.97 | 0.95 | 98.50 | 86.80 | 31.91 | 192 |
| F380T | 0.59 | 0.40 | 67.20 | 1.14 | 1.62 | 142.48 | 104.84 | 31.91 | 113 |
| F380V | 1.52 | 0.97 | 64.19 | 0.90 | 0.38 | 42.73 | 53.46 | 24.26 | 336 |
| F380W | 14.68 | 3.34 | 22.78 | 12.12 | 2.54 | 20.91 | 21.85 | 24.26 | |
| F380Y | 3.42 | 1.26 | 36.74 | 3.11 | 0.87 | 27.96 | 32.35 | 24.26 | |
| T381E | 0.92 | 0.32 | 34.75 | 0.90 | 0.22 | 24.35 | 29.55 | 24.26 | |
| T381H | 1.34 | 0.49 | 36.24 | 1.17 | 0.29 | 24.39 | 30.31 | 24.26 | |
| T381K | 0.21 | 0.10 | 44.96 | 0.23 | 0.10 | 41.04 | 43.00 | 27.20 | |
| T381N | 1.42 | 0.48 | 33.74 | 1.11 | 0.29 | 26.20 | 29.97 | 24.26 | |
| T381Q | 1.90 | 0.70 | 36.68 | 1.65 | 0.45 | 27.19 | 31.94 | 24.26 | |
| T381R | 3.51 | 1.54 | 43.88 | 2.23 | 0.98 | 43.89 | 43.88 | 24.26 | |
| T381S | 2.56 | 1.12 | 43.76 | 2.51 | 1.02 | 40.50 | 42.13 | 26.26 | |
| T381V | 1.78 | 0.60 | 33.71 | 1.57 | 0.48 | 30.78 | 32.24 | 26.26 | |
| R383A | 0.79 | 0.21 | 27.00 | 0.79 | 0.18 | 22.95 | 24.97 | 26.26 | |
| R383E | 0.76 | 0.20 | 25.92 | 0.74 | 0.13 | 18.05 | 21.98 | 26.26 | |
| R383H | 1.01 | 0.33 | 33.00 | 1.13 | 0.30 | 26.06 | 29.53 | 27.20 | |
| R383I | 0.81 | 0.24 | 29.16 | 0.96 | 0.27 | 28.41 | 28.79 | 36.38 | |
| R383K | 0.65 | 0.22 | 33.49 | 0.64 | 0.15 | 23.26 | 28.37 | 26.26 | |
| R383M | 0.79 | 0.19 | 24.21 | 0.67 | 0.17 | 25.56 | 24.88 | 26.26 | |
| R383N | 1.05 | 0.30 | 28.31 | 0.96 | 0.28 | 29.30 | 28.80 | 26.26 | |
| R383S | 3.80 | 1.89 | 49.91 | 2.49 | 0.72 | 28.89 | 39.40 | 27.07 | |
| R383T | 2.55 | 0.49 | 19.02 | 2.40 | 0.57 | 23.71 | 21.37 | 27.07 | |
| R383V | 1.89 | 0.48 | 25.43 | 2.09 | 0.41 | 19.57 | 22.50 | 27.07 | |
| K385A | 0.50 | 0.00 | 0.00 | 0.64 | 0.00 | 0.00 | 0.00 | 0.00 | |
| K385Q | 1.26 | 0.00 | 0.00 | 1.50 | 0.03 | 1.73 | 0.86 | 0.00 | |
| K385R | 1.22 | 0.00 | 0.00 | 1.36 | 0.01 | 0.44 | 0.22 | 0.00 | |
| K385S | 0.78 | 0.00 | 0.00 | 0.80 | 0.00 | 0.00 | 0.00 | 0.00 | |
| T387S | 0.78 | 0.24 | 31.06 | 0.55 | 0.20 | 35.41 | 33.23 | 18.12 | |
| L388F | 0.48 | 0.23 | 48.90 | 0.69 | 0.28 | 39.73 | 44.31 | 37.83 | |
| L388H | 0.14 | 0.15 | 104.56 | 0.33 | 0.23 | 68.33 | 86.44 | 26.52 | 351 |
| L388I | 2.15 | 0.64 | 29.79 | 1.95 | 0.75 | 38.62 | 34.20 | 26.25 | |
| L388M | 0.48 | 0.19 | 39.25 | 0.28 | 0.14 | 50.44 | 44.85 | 39.97 | |
| L388R | 0.63 | 0.18 | 28.22 | 0.69 | 0.19 | 27.12 | 27.67 | 27.20 | |
| L388T | 0.38 | 0.18 | 46.48 | 0.44 | 0.18 | 40.07 | 43.28 | 28.63 | |
| L388V | 1.07 | 0.35 | 32.57 | 0.82 | 0.28 | 34.27 | 33.42 | 39.97 | |
| L388W | 0.47 | 0.19 | 39.35 | 0.46 | 0.18 | 37.86 | 38.61 | 37.53 | |
| L388Y | 1.60 | 0.20 | 12.55 | 1.61 | 0.36 | 22.59 | 17.57 | 39.97 | |
| E389A | 0.94 | 0.42 | 44.66 | 1.36 | 0.49 | 36.16 | 40.41 | 28.26 | |
| E389G | 0.35 | 0.17 | 47.41 | 0.38 | 0.18 | 47.75 | 47.58 | 34.42 | |
| E389H | 1.29 | 0.35 | 27.05 | 1.06 | 0.27 | 25.25 | 26.15 | 17.14 | |
| E389K | 0.25 | 0.14 | 58.15 | 0.22 | 0.13 | 61.61 | 59.88 | 17.14 | 338 |
| E389L | 0.61 | 0.20 | 32.76 | 0.57 | 0.20 | 35.11 | 33.93 | 34.42 | |
| E389M | 0.41 | 0.12 | 29.39 | 0.41 | 0.14 | 34.65 | 32.02 | 19.08 | |
| E389Q | 0.81 | 0.25 | 31.08 | 0.92 | 0.20 | 22.23 | 26.66 | 19.08 | |
| E389R | 0.87 | 0.35 | 39.86 | 0.81 | 0.29 | 35.82 | 37.84 | 28.26 | |
| E392A | 0.59 | 0.00 | 0.00 | 0.68 | 0.00 | 0.00 | 0.00 | 0.00 | |
| E392F | 0.27 | 0.00 | 0.00 | 0.37 | 0.00 | 0.00 | 0.00 | 0.00 | |
| E392K | 0.46 | 0.00 | 0.00 | 0.67 | 0.00 | 0.00 | 0.00 | 0.00 | |
| E392L | 3.36 | 1.48 | 43.94 | 1.84 | 0.72 | 38.89 | 41.42 | 9.66 | |
| E392M | 2.31 | 0.89 | 38.47 | 1.74 | 0.49 | 28.10 | 33.29 | 9.66 | |
| E392Q | 2.64 | 1.14 | 43.29 | 1.59 | 0.50 | 31.31 | 37.30 | 9.66 | |
| E392R | 1.62 | 0.56 | 34.26 | 1.05 | 0.31 | 29.77 | 32.01 | 9.66 | |
| E392S | 0.82 | 0.32 | 38.96 | 0.63 | 0.18 | 28.53 | 33.74 | 9.66 | |
| E392T | 1.28 | 0.49 | 38.26 | 0.91 | 0.26 | 28.51 | 33.38 | 9.66 | |
| E392V | 2.09 | 0.65 | 31.09 | 1.15 | 0.30 | 26.35 | 28.72 | 9.66 | |
| E392Y | 2.98 | 1.14 | 38.12 | 1.54 | 0.48 | 30.93 | 34.52 | 9.66 | |
| Q393F | 0.33 | 0.12 | 36.46 | 0.28 | 0.10 | 34.51 | 35.49 | 27.93 | |
| Q393H | 1.70 | 0.58 | 34.23 | 1.62 | 0.07 | 4.27 | 19.25 | 17.14 | |
| Q393L | 0.42 | 0.26 | 61.83 | 0.48 | 0.19 | 40.06 | 50.95 | 17.14 | 339 |
| Q393N | 1.19 | 0.37 | 31.42 | 1.61 | 0.31 | 19.23 | 25.32 | 27.20 | |
| Q393S | 0.41 | 0.11 | 26.92 | 0.12 | 0.00 | 2.59 | 14.75 | 26.25 | |
| Q393T | 0.19 | 0.08 | 41.93 | 0.21 | 0.06 | 30.12 | 36.02 | 27.93 | |
| S395A | 0.98 | 0.24 | 24.27 | 0.73 | 0.14 | 19.14 | 21.71 | 4.00 | |
| S395H | 0.77 | 0.20 | 26.31 | 0.79 | 0.25 | 31.78 | 29.05 | 27.93 | |
| S395K | 2.67 | 0.77 | 29.01 | 1.85 | 0.52 | 28.15 | 28.58 | 4.00 | |
| S395R | 1.25 | 0.36 | 28.94 | 1.04 | 0.25 | 24.31 | 26.63 | 4.00 | |
| S395T | 0.27 | 0.10 | 35.35 | 0.29 | 0.10 | 35.75 | 35.55 | 27.93 | |
| E396A | 0.27 | 0.10 | 36.60 | 0.22 | 0.02 | 9.55 | 23.07 | 4.00 | |
| E396D | 0.89 | 0.26 | 29.76 | 0.84 | 0.14 | 16.85 | 23.30 | 4.00 | |
| E396H | 0.52 | 0.11 | 20.73 | 0.45 | 0.03 | 7.24 | 13.98 | 4.00 | |
| E396L | 0.81 | 0.19 | 23.66 | 0.67 | 0.13 | 19.69 | 21.67 | 4.00 | |
| E396Q | 0.90 | 0.25 | 27.13 | 0.96 | 0.22 | 23.19 | 25.16 | 27.93 | |
| E396R | 1.15 | 0.33 | 29.01 | 0.80 | 0.26 | 31.88 | 30.44 | 19.42 | |
| E396S | 1.03 | 0.33 | 32.21 | 0.99 | 0.28 | 28.48 | 30.35 | 19.42 | |
| E396T | 0.76 | 0.23 | 30.01 | 0.63 | 0.20 | 32.22 | 31.12 | 19.42 | |
| Y399E | 3.58 | 1.18 | 32.85 | 3.46 | 1.08 | 31.26 | 32.06 | 17.14 | |
| Y399K | 5.34 | 1.86 | 34.76 | 4.78 | 1.63 | 34.18 | 34.47 | 17.14 | |
| Y399M | 1.60 | 0.82 | 51.25 | 1.73 | 0.82 | 47.37 | 49.31 | 34.83 | |
| Y399Q | 1.09 | 0.46 | 42.63 | 1.26 | 0.64 | 51.03 | 46.83 | 31.17 | |
| Y399R | 0.65 | 0.33 | 50.81 | 0.60 | 0.29 | 49.24 | 50.03 | 34.83 | 340 |
| Y399S | 0.98 | 0.39 | 40.11 | 0.84 | 0.34 | 40.24 | 40.18 | 34.83 | |
| Y399T | 2.80 | 1.00 | 35.61 | 2.42 | 1.01 | 41.52 | 38.56 | 34.83 | |
| Y399V | 2.51 | 0.69 | 27.54 | 2.65 | 0.73 | 27.39 | 27.47 | 22.91 | |
| Y399W | 0.32 | 0.20 | 62.24 | 0.46 | 0.21 | 45.03 | 53.64 | 31.17 | 341 |
| S401A | 1.55 | 0.06 | 3.56 | 1.55 | 0.03 | 1.96 | 2.76 | 19.42 | |
| S401E | 1.00 | 0.33 | 32.52 | 0.88 | 0.26 | 30.02 | 31.27 | 19.42 | |
| S401G | 0.17 | 0.11 | 62.94 | 0.18 | 0.09 | 48.60 | 55.77 | 19.42 | 342 |
| S401N | 1.97 | 0.30 | 15.46 | 1.14 | 0.31 | 26.91 | 21.18 | 22.91 | |
| Y403F | 0.50 | 0.30 | 59.08 | 0.58 | 0.26 | 44.25 | 51.67 | 34.83 | 343 |
| T405K | 0.66 | 0.30 | 44.65 | 0.51 | 0.21 | 41.63 | 43.14 | 35.45 | |
| T405M | 1.19 | 0.48 | 40.05 | 1.48 | 0.60 | 40.56 | 40.31 | 24.78 | |
| T405R | 0.66 | 0.24 | 35.95 | 0.70 | 0.28 | 40.50 | 38.22 | 24.78 | |
| T405S | 1.10 | 0.33 | 29.58 | 1.66 | 0.53 | 32.12 | 30.85 | 22.91 | |
| L406A | 0.73 | 0.27 | 37.06 | 0.62 | 0.23 | 36.93 | 37.00 | 28.63 | |
| L406E | 1.28 | 0.37 | 28.99 | 1.30 | 0.38 | 29.35 | 29.17 | 39.97 | |
| L406F | 0.34 | 0.14 | 42.39 | 0.24 | 0.11 | 45.17 | 43.78 | 39.97 | |
| L406G | 2.34 | 0.87 | 37.12 | 1.38 | 0.02 | 1.52 | 19.32 | 39.97 | |
| L406I | 0.94 | 0.35 | 36.78 | 0.65 | 0.32 | 48.66 | 42.72 | 28.63 | |
| L406N | 0.26 | 0.20 | 74.38 | 0.32 | 0.20 | 63.48 | 68.93 | 23.96 | 317 |
| L406Q | 0.68 | 0.19 | 27.68 | 1.50 | 0.38 | 25.13 | 26.40 | 22.91 | |
| L406S | 0.17 | 0.09 | 48.85 | 0.17 | 0.08 | 50.30 | 49.57 | 30.48 | |
| L406T | 0.84 | 0.23 | 27.11 | 0.77 | 0.27 | 34.79 | 30.95 | 30.48 | |
| L406V | 0.65 | 0.33 | 50.23 | 0.70 | 0.30 | 43.29 | 46.76 | 23.96 | |
| S407A | 0.19 | 0.04 | 18.62 | 0.17 | 0.01 | 5.56 | 12.09 | 35.45 | |
| S407D | 0.83 | 0.42 | 51.18 | 0.86 | 0.38 | 44.54 | 47.86 | 37.88 | |
| S407E | 0.43 | 0.17 | 38.75 | 0.49 | 0.17 | 35.56 | 37.15 | 31.75 | |
| S407F | 0.27 | 0.18 | 68.03 | 0.25 | 0.15 | 58.65 | 63.34 | 23.96 | 318 |
| S407H | 0.31 | 0.18 | 59.55 | 0.29 | 0.14 | 46.52 | 53.03 | 23.96 | 346 |
| S407L | 0.58 | 0.25 | 42.45 | 0.41 | 0.19 | 44.87 | 43.66 | 30.53 | |
| S407M | 0.36 | 0.24 | 66.57 | 0.51 | 0.20 | 38.54 | 52.56 | 31.75 | 347 |
| S407N | 0.78 | 0.20 | 25.66 | 1.27 | 0.34 | 27.14 | 26.40 | 22.91 | |
| S407P | 0.23 | 0.15 | 64.97 | 0.27 | 0.09 | 35.14 | 50.05 | 31.75 | 348 |
| S407Q | 0.20 | 0.16 | 77.17 | 0.28 | 0.12 | 43.68 | 60.43 | 31.75 | 198 |
| S407R | 0.53 | 0.26 | 48.77 | 0.48 | 0.20 | 41.05 | 44.91 | 23.96 | |
| K409E | 0.94 | 0.42 | 44.76 | 1.00 | 0.45 | 44.79 | 44.78 | 27.54 | |
| K409H | 0.49 | 0.11 | 23.26 | 0.85 | 0.23 | 27.04 | 25.15 | 22.91 | |
| K409Q | 1.10 | 0.46 | 41.72 | 0.95 | 0.32 | 33.65 | 37.68 | 33.75 | |
| K409S | 1.66 | 0.60 | 36.18 | 2.11 | 0.96 | 45.48 | 40.83 | 27.93 | |
| K409T | 1.43 | 0.57 | 39.90 | 0.96 | 0.36 | 38.00 | 38.95 | 33.75 | |
| E410D | 0.27 | 0.03 | 12.10 | 0.67 | 0.09 | 13.88 | 12.99 | 22.91 | |
| E410M | 0.46 | 0.23 | 51.20 | 0.45 | 0.19 | 43.37 | 47.29 | 31.17 | |
| E410P | 0.91 | 0.41 | 44.74 | 0.59 | 0.20 | 34.01 | 39.38 | 33.75 | |
| E410S | 2.11 | 1.60 | 76.06 | 1.79 | 1.09 | 60.69 | 68.37 | 33.75 | 230 |
| E410T | 2.89 | 1.20 | 41.61 | 3.32 | 1.26 | 37.81 | 39.71 | 32.12 | |
| K411A | 0.18 | 0.08 | 43.34 | 0.18 | 0.06 | 32.05 | 37.70 | 37.77 | |
| K411H | 0.23 | 0.08 | 34.21 | 0.23 | 0.05 | 21.51 | 27.86 | 37.77 | |
| K411N | 0.58 | 0.22 | 37.93 | 0.61 | 0.20 | 32.13 | 35.03 | 37.77 | |
| K411P | 0.51 | 0.13 | 25.83 | 0.43 | 0.12 | 27.58 | 26.71 | 51.63 | |
| K411R | 0.45 | 0.13 | 28.82 | 0.39 | 0.12 | 29.63 | 29.23 | 51.63 | |
| K411S | 0.69 | 0.21 | 29.80 | 0.54 | 0.16 | 30.26 | 30.03 | 51.63 | |
| K411T | 0.87 | 0.34 | 39.20 | 0.77 | 0.22 | 28.48 | 33.84 | 51.63 | |
| K411V | 0.69 | 0.29 | 41.46 | 0.64 | 0.22 | 34.61 | 38.03 | 51.63 | |
| A412D | 1.24 | 0.54 | 43.52 | 1.54 | 0.53 | 34.13 | 38.83 | 31.75 | |
| A412G | 0.15 | 0.09 | 61.17 | 0.24 | 0.28 | 113.76 | 87.46 | 29.74 | 296 |
| A412H | 0.70 | 0.14 | 19.89 | 0.87 | 0.13 | 14.67 | 17.28 | 31.98 | |
| A412I | 0.17 | 0.04 | 24.93 | 0.51 | 0.27 | 53.75 | 39.34 | 29.74 | |
| A412L | 0.57 | 0.27 | 47.33 | 1.34 | 0.62 | 46.19 | 46.76 | 29.74 | |
| A412N | 0.45 | 0.20 | 45.58 | 0.49 | 0.19 | 39.84 | 42.71 | 31.17 | |
| A412P | 0.16 | 0.14 | 86.25 | 0.19 | 0.14 | 77.07 | 81.66 | 28.04 | 244 |
| A412Q | 0.71 | 0.23 | 31.77 | 1.74 | 0.82 | 47.41 | 39.59 | 29.74 | |
| A412R | 0.95 | 0.27 | 28.98 | 0.97 | 0.27 | 28.15 | 28.57 | 34.42 | |
| D284S | 0.31 | 0.37 | 119.17 | 0.35 | 0.41 | 116.31 | 117.74 | 37.53 | 136 |
| A412V | 0.49 | 0.23 | 46.42 | 0.32 | 0.15 | 45.99 | 46.20 | 30.53 | |
| A412W | 0.44 | 0.18 | 41.42 | 0.51 | 0.20 | 38.89 | 40.15 | 34.42 | |
| A412Y | 0.51 | 0.21 | 41.01 | 0.55 | 0.20 | 36.80 | 38.91 | 34.42 | |
| D413K | 0.45 | 0.19 | 40.93 | 0.54 | 0.15 | 26.98 | 33.95 | 34.42 | |
| D413N | 0.73 | 0.19 | 25.54 | 1.18 | 0.28 | 23.95 | 24.75 | 22.91 | |
| D413Q | 0.15 | 0.11 | 76.71 | 0.23 | 0.15 | 64.67 | 70.69 | 27.59 | 260 |
| D413R | 0.46 | 0.15 | 33.41 | 0.43 | 0.14 | 32.29 | 32.85 | 34.42 | |
| D413S | 0.90 | 0.36 | 39.84 | 0.90 | 0.36 | 40.51 | 40.18 | 27.87 | |
| D413T | 0.44 | 0.19 | 43.23 | 0.25 | 0.17 | 70.16 | 56.69 | 27.87 | 354 |
| V414I | 0.53 | 0.20 | 36.52 | 0.57 | 0.20 | 34.65 | 35.58 | 32.12 | |
| K415G | 0.39 | 0.23 | 58.83 | 0.67 | 0.21 | 31.73 | 45.28 | 27.59 | |
| K415W | 0.33 | 0.20 | 61.03 | 0.50 | 0.20 | 40.42 | 50.72 | 27.59 | 355 |
| D416F | 0.39 | 0.18 | 46.73 | 0.29 | 0.06 | 22.63 | 34.68 | 21.17 | |
| D416G | 0.38 | 0.11 | 28.25 | 0.31 | 0.08 | 26.31 | 27.28 | 21.17 | |
| D416H | 0.19 | 0.08 | 39.63 | 0.22 | 0.12 | 55.02 | 47.33 | 24.69 | |
| D416I | 0.54 | 0.13 | 23.86 | 0.64 | 0.20 | 31.62 | 27.74 | 31.57 | |
| D416K | 1.11 | 0.45 | 40.39 | 0.89 | 0.27 | 30.26 | 35.33 | 21.17 | |
| D416L | 1.03 | 0.46 | 44.80 | 1.06 | 0.42 | 39.24 | 42.02 | 29.17 | |
| D416N | 0.88 | 0.29 | 32.97 | 0.76 | 0.20 | 25.94 | 29.46 | 31.91 | |
| D416Q | 0.30 | 0.08 | 26.07 | 0.25 | 0.06 | 23.27 | 24.67 | 31.77 | |
| D416R | 0.17 | 0.10 | 56.18 | 0.20 | 0.09 | 43.51 | 49.84 | 29.17 | |
| T417I | 0.81 | 0.32 | 39.06 | 0.77 | 0.25 | 33.01 | 36.04 | 31.77 | |
| T417L | 0.28 | 0.16 | 56.63 | 0.28 | 0.13 | 45.71 | 51.17 | 29.17 | 356 |
| D418A | 1.14 | 0.30 | 26.74 | 0.90 | 0.34 | 37.60 | 32.17 | 29.17 | |
| D418E | 0.48 | 0.17 | 35.19 | 0.42 | 0.15 | 35.06 | 35.12 | 31.77 | |
| D418F | 0.64 | 0.22 | 35.04 | 0.57 | 0.18 | 30.95 | 33.00 | 31.91 | |
| D418G | 0.44 | 0.14 | 32.80 | 0.46 | 0.18 | 38.41 | 35.61 | 29.17 | |
| D418I | 1.84 | 0.48 | 26.06 | 2.38 | 0.77 | 32.14 | 29.10 | 31.57 | |
| D418L | 0.67 | 0.24 | 35.78 | 0.72 | 0.25 | 35.00 | 35.39 | 29.17 | |
| D418M | 1.08 | 0.38 | 35.22 | 0.95 | 0.32 | 33.23 | 34.22 | 29.17 | |
| D418N | 1.26 | 0.42 | 33.25 | 1.08 | 0.38 | 34.75 | 34.00 | 26.51 | |
| D418P | 0.65 | 0.22 | 34.31 | 0.72 | 0.25 | 35.12 | 34.71 | 26.51 | |
| D418Q | 1.11 | 0.37 | 33.36 | 1.28 | 0.37 | 29.11 | 31.24 | 26.51 | |
| D418R | 1.13 | 0.35 | 30.93 | 1.45 | 0.35 | 24.38 | 27.66 | 26.51 | |
| D418S | 0.76 | 0.25 | 32.37 | 0.78 | 0.20 | 26.13 | 29.25 | 26.51 | |
| D418V | 1.26 | 0.41 | 32.74 | 1.53 | 0.37 | 24.37 | 28.56 | 26.51 | |
| D418Y | 0.82 | 0.35 | 43.19 | 0.87 | 0.26 | 30.11 | 36.65 | 26.51 | |
| A419E | 0.23 | 0.04 | 17.14 | 0.30 | 0.05 | 16.06 | 16.60 | 31.57 | |
| A419F | 0.58 | 0.23 | 40.03 | 0.72 | 0.38 | 52.39 | 46.21 | 30.10 | |
| A419G | 0.56 | 0.24 | 42.55 | 0.58 | 0.21 | 36.96 | 39.75 | 27.87 | |
| A419H | 4.24 | 1.00 | 23.60 | 3.96 | 0.88 | 22.11 | 22.85 | 31.91 | |
| A419I | 0.99 | 0.39 | 39.55 | 1.36 | 0.53 | 39.37 | 39.46 | 30.10 | |
| A419K | 6.23 | 1.90 | 30.53 | 11.48 | 3.06 | 26.69 | 28.61 | 30.10 | |
| A419L | 0.49 | 0.19 | 37.91 | 0.38 | 0.26 | 68.32 | 53.12 | 26.51 | 357 |
| A419R | 2.80 | 1.09 | 38.94 | 3.35 | 1.18 | 35.14 | 37.04 | 24.88 | |
| A419S | 4.61 | 2.24 | 48.60 | 2.24 | 0.82 | 36.51 | 42.55 | 34.49 | |
| A419W | 1.65 | 0.66 | 40.25 | 0.89 | 0.29 | 32.90 | 36.58 | 34.49 | |
| A419Y | 4.84 | 1.76 | 36.32 | 3.39 | 1.00 | 29.54 | 32.93 | 34.49 | |
| V420I | 0.19 | 0.04 | 19.85 | 0.15 | 0.03 | 18.18 | 19.01 | 34.49 | |
| D421A | 2.47 | 0.91 | 36.74 | 1.82 | 0.57 | 31.22 | 33.98 | 34.49 | |
| D421E | 1.68 | 0.61 | 36.08 | 1.03 | 0.30 | 29.40 | 32.74 | 34.49 | |
| D421G | 0.73 | 0.34 | 45.87 | 0.54 | 0.16 | 29.45 | 37.66 | 34.49 | |
| D421H | 6.72 | 1.61 | 23.99 | 9.33 | 2.50 | 26.76 | 25.37 | 31.57 | |
| D421I | 0.65 | 0.44 | 66.54 | 0.32 | 0.15 | 45.75 | 56.14 | 34.49 | 358 |
| D421K | 0.24 | 0.08 | 32.36 | 0.20 | 0.09 | 46.63 | 39.50 | 31.00 | |
| D421L | 1.48 | 0.45 | 30.17 | 1.67 | 0.75 | 45.16 | 37.66 | 31.57 | |
| D421M | 0.33 | 0.07 | 22.09 | 0.11 | 0.11 | 100.44 | 61.26 | 31.57 | 271 |
| D421N | 0.99 | 0.43 | 43.86 | 0.67 | 0.28 | 41.82 | 42.84 | 32.10 | |
| D421Q | 2.08 | 0.65 | 31.30 | 1.66 | 0.57 | 34.36 | 32.83 | 31.00 | |
| D421R | 0.11 | 0.06 | 56.76 | 0.11 | 0.03 | 30.66 | 43.71 | 31.00 | |
| D421T | 1.88 | 0.75 | 39.64 | 1.84 | 0.49 | 26.55 | 33.09 | 16.69 | |
| D421Y | 0.87 | 0.19 | 21.53 | 0.86 | 0.07 | 8.28 | 14.90 | 16.69 | |
| V422I | 0.19 | 0.04 | 20.64 | 0.19 | 0.04 | 18.35 | 19.49 | 31.00 | |
| A425G | 3.16 | 0.72 | 22.83 | 3.83 | 1.11 | 29.00 | 25.91 | 14.50 | |
| A425K | 0.18 | 0.06 | 33.97 | 0.18 | 0.05 | 28.46 | 31.21 | 31.91 | |
| A425M | 0.94 | 0.42 | 44.06 | 0.80 | 0.27 | 34.02 | 39.04 | 16.69 | |
| A425N | 0.15 | 0.00 | 0.00 | 0.14 | 0.00 | 0.00 | 0.00 | 14.50 | |
| A425S | 0.30 | 0.01 | 1.83 | 0.38 | 0.00 | 0.00 | 0.91 | 14.50 | |
| D426E | 1.36 | 0.51 | 37.70 | 0.95 | 0.29 | 30.07 | 33.89 | 32.10 | |
| D426G | 0.60 | 0.01 | 1.50 | 0.69 | 0.05 | 6.89 | 4.20 | 14.50 | |
| D426K | 0.51 | 0.04 | 6.85 | 0.51 | 0.00 | 0.00 | 3.42 | 14.50 | |
| D426N | 0.88 | 0.13 | 14.69 | 1.01 | 0.07 | 6.48 | 10.58 | 14.50 | |
| D426P | 0.19 | 0.01 | 6.91 | 0.14 | 0.00 | 0.00 | 3.46 | 14.50 | |
| D426Q | 0.27 | 0.03 | 9.43 | 0.34 | 0.04 | 11.44 | 10.44 | 25.43 | |
| D426S | 0.30 | 0.07 | 22.35 | 0.30 | 0.00 | 0.00 | 11.18 | 25.43 | |
| G427H | 0.48 | 0.18 | 38.15 | 0.40 | 0.13 | 33.63 | 35.89 | 32.10 | |
| V428L | 2.65 | 0.38 | 14.21 | 2.66 | 0.28 | 10.34 | 12.27 | 25.43 | |
| V428P | 0.31 | 0.18 | 59.13 | 0.23 | 0.18 | 78.54 | 68.83 | 21.41 | 119 |
| D431A | 0.40 | 0.22 | 55.21 | 0.24 | 0.20 | 84.18 | 69.69 | 21.41 | 123 |
| D431E | 1.68 | 0.53 | 31.66 | 1.68 | 0.36 | 21.30 | 26.48 | 25.43 | |
| D431G | 0.52 | 0.27 | 51.72 | 0.51 | 0.25 | 49.95 | 50.84 | 21.41 | 362 |
| D431H | 3.69 | 1.27 | 34.37 | 3.12 | 0.89 | 28.43 | 31.40 | 32.10 | |
| D431I | 3.76 | 0.72 | 19.10 | 3.58 | 0.68 | 18.93 | 19.01 | 8.62 | |
| D431K | 6.04 | 1.01 | 16.75 | 5.02 | 0.93 | 18.55 | 17.65 | 8.62 | |
| D431N | 1.76 | 0.21 | 11.85 | 2.85 | 0.33 | 11.63 | 11.74 | 8.62 | |
| D431Q | 2.00 | 0.36 | 17.87 | 2.56 | 0.29 | 11.34 | 14.61 | 8.62 | |
| D431R | 2.80 | 0.98 | 35.12 | 2.65 | 0.87 | 33.04 | 34.08 | 31.17 | |
| D431S | 2.24 | 0.28 | 12.68 | 2.29 | 0.39 | 17.08 | 14.88 | 8.62 | |
| D431V | 1.41 | 0.54 | 38.22 | 1.37 | 0.49 | 36.01 | 37.12 | 31.17 | |
| D431Y | 0.99 | 0.39 | 39.36 | 0.97 | 0.29 | 29.69 | 34.53 | 32.10 | |
| A432E | 0.59 | 0.00 | 0.00 | 0.65 | 0.02 | 2.47 | 1.23 | 8.62 | |
| A432G | 0.50 | 0.01 | 1.01 | 0.49 | 0.00 | 0.00 | 0.50 | 8.62 | |
| A432V | 0.73 | 0.00 | 0.27 | 0.73 | 0.00 | 0.48 | 0.38 | 8.62 | |
| F433A | 0.78 | 0.25 | 32.22 | 0.72 | 0.26 | 36.15 | 34.18 | 13.62 | |
| F433C | 0.94 | 0.29 | 30.75 | 0.67 | 0.26 | 38.58 | 34.66 | 32.10 | |
| F433D | 0.29 | 0.00 | 1.22 | 0.36 | 0.08 | 23.57 | 12.40 | 13.62 | |
| F433H | 0.18 | 0.00 | 0.00 | 0.18 | 0.00 | 0.00 | 0.00 | 13.62 | |
| F433I | 0.16 | 0.00 | 0.00 | 0.21 | 0.00 | 0.00 | 0.00 | 13.62 | |
| F433K | 0.85 | 0.16 | 19.22 | 1.09 | 0.47 | 42.94 | 31.08 | 13.62 | |
| F433L | 0.20 | 0.13 | 65.22 | 0.17 | 0.11 | 62.07 | 63.64 | 35.08 | 331 |
| F433P | 0.41 | 0.01 | 3.33 | 0.58 | 0.17 | 29.80 | 16.57 | 13.62 | |
| F433R | 4.18 | 1.24 | 29.68 | 4.91 | 1.11 | 22.65 | 26.17 | 25.43 | |
| F433S | 2.92 | 0.91 | 31.20 | 3.10 | 0.74 | 23.88 | 27.54 | 25.43 | |
| F433T | 0.24 | 0.17 | 71.70 | 0.15 | 0.14 | 89.18 | 80.44 | 35.08 | 332 |
| F433V | 2.22 | 1.29 | 57.81 | 2.15 | 0.88 | 41.01 | 49.41 | 35.08 | |
| L434F | 1.02 | 0.61 | 60.05 | 0.73 | 0.26 | 36.09 | 48.07 | 35.08 | |
| L434F | 0.95 | 0.33 | 34.32 | 0.88 | 0.30 | 33.43 | 33.87 | 31.17 | |
| L434I | 1.03 | 0.62 | 60.25 | 0.60 | 0.25 | 42.42 | 51.33 | 35.08 | 365 |
| L434M | 2.93 | 2.10 | 71.68 | 1.99 | 0.85 | 42.66 | 57.17 | 35.08 | 366 |
| L434V | 0.75 | 0.28 | 37.15 | 0.83 | 0.35 | 42.04 | 39.59 | 27.64 | |
| K435E | 0.57 | 0.22 | 37.98 | 0.63 | 0.18 | 28.56 | 33.27 | 27.64 | |
| K435G | 0.56 | 0.21 | 36.90 | 0.64 | 0.25 | 38.85 | 37.87 | 27.64 | |
| K435H | 0.13 | 0.06 | 51.60 | 0.15 | 0.09 | 57.48 | 54.54 | 27.64 | 367 |
| K435R | 1.02 | 0.32 | 30.92 | 1.09 | 0.31 | 28.34 | 29.63 | 6.03 | |
| K435S | 0.31 | 0.15 | 48.09 | 0.35 | 0.11 | 31.02 | 39.55 | 27.64 | |
| K435T | 0.51 | 0.15 | 30.53 | 0.51 | 0.13 | 25.12 | 27.83 | 6.03 | |
| K435Y | 0.48 | 0.23 | 47.38 | 0.45 | 0.23 | 51.83 | 49.61 | 37.32 | |
| P436D | 2.09 | 0.57 | 27.09 | 1.64 | 0.39 | 23.78 | 25.43 | 32.10 | |
| P436E | 2.12 | 0.77 | 36.33 | 2.37 | 0.73 | 30.90 | 33.61 | 37.32 | |
| P436G | 0.43 | 0.21 | 48.83 | 0.49 | 0.18 | 37.70 | 43.27 | 37.32 | |
| P436H | 0.60 | 0.25 | 42.24 | 0.64 | 0.24 | 36.75 | 39.49 | 37.32 | |
| P436I | 0.50 | 0.19 | 38.46 | 0.53 | 0.17 | 31.16 | 34.81 | 23.27 | |
| P436K | 0.85 | 0.24 | 27.95 | 0.96 | 0.32 | 33.77 | 30.86 | 37.32 | |
| P436L | 0.17 | 0.08 | 44.31 | 0.22 | 0.07 | 32.87 | 38.59 | 37.32 | |
| P436M | 1.21 | 0.18 | 15.21 | 1.09 | 0.12 | 10.63 | 12.92 | 6.03 | |
| P436Q | 1.98 | 0.63 | 31.86 | 1.66 | 0.55 | 33.37 | 32.62 | 29.87 | |
| P436R | 2.25 | 0.61 | 27.32 | 2.29 | 0.73 | 31.94 | 29.63 | 32.10 | |
| P436S | 0.85 | 0.22 | 26.18 | 0.91 | 0.19 | 21.37 | 23.78 | 6.03 | |
| P436T | 0.50 | 0.11 | 22.27 | 0.52 | 0.15 | 29.90 | 26.08 | 29.87 | |
| P436W | 0.24 | 0.00 | 0.00 | 0.28 | 0.01 | 2.15 | 1.08 | 33.76 | |
| P436Y | 0.58 | 0.17 | 29.77 | 0.55 | 0.10 | 18.96 | 24.36 | 6.03 | |
| P437A | 0.19 | 0.09 | 49.33 | 0.23 | 0.05 | 22.81 | 36.07 | 29.87 | |
| P437D | 1.11 | 0.36 | 32.85 | 1.14 | 0.29 | 25.14 | 29.00 | 29.87 | |
| P437H | 1.04 | 0.30 | 28.70 | 0.68 | 0.21 | 31.11 | 29.91 | 31.22 | |
| P437I | 0.54 | 0.16 | 28.86 | 0.54 | 0.10 | 17.85 | 23.36 | 6.03 | |
| P437K | 1.81 | 0.30 | 16.64 | 1.35 | 0.34 | 25.30 | 20.97 | 31.22 | |
| P437L | 0.80 | 0.16 | 19.43 | 0.71 | 0.15 | 21.14 | 20.28 | 31.22 | |
| P437M | 0.32 | 0.06 | 19.50 | 0.34 | 0.08 | 22.44 | 20.97 | 31.22 | |
| P437Q | 1.59 | 0.39 | 24.21 | 1.33 | 0.36 | 26.73 | 25.47 | 31.22 | |
| P437R | 0.74 | 0.25 | 33.95 | 0.90 | 0.28 | 31.21 | 32.58 | 23.27 | |
| P437S | 1.08 | 0.32 | 29.55 | 1.26 | 0.29 | 22.88 | 26.22 | 6.03 | |
| M438A | 0.32 | 0.16 | 50.54 | 0.35 | 0.58 | 165.29 | 107.91 | 30.85 | 170 |
| M438C | 0.99 | 0.35 | 35.67 | 1.82 | 1.07 | 58.77 | 47.22 | 30.85 | |
| M438D | 1.44 | 0.45 | 31.02 | 1.14 | 0.35 | 30.89 | 30.96 | 4.17 | |
| M438E | 2.06 | 0.54 | 26.22 | 3.89 | 1.61 | 41.43 | 33.83 | 30.85 | |
| M438L | 2.08 | 0.76 | 36.66 | 3.24 | 1.26 | 39.00 | 37.83 | 30.85 | |
| M438N | 1.83 | 0.55 | 30.11 | 4.21 | 1.88 | 44.78 | 37.45 | 30.85 | |
| M438P | 4.80 | 1.88 | 39.25 | 3.20 | 0.91 | 28.34 | 33.80 | 28.95 | |
| M438Q | 2.60 | 0.85 | 32.63 | 2.43 | 0.74 | 30.32 | 31.47 | 28.95 | |
| M438R | 2.84 | 1.00 | 35.07 | 2.85 | 0.76 | 26.55 | 30.81 | 28.95 | |
| M438S | 2.73 | 0.87 | 32.07 | 2.59 | 0.92 | 35.43 | 33.75 | 28.95 | |
| M438T | 1.78 | 0.90 | 50.32 | 1.56 | 0.54 | 34.45 | 42.39 | 28.95 | |
| M438V | 0.35 | 0.18 | 49.86 | 0.41 | 0.17 | 41.28 | 45.57 | 24.69 | |
| M438W | 1.05 | 0.38 | 36.45 | 0.73 | 0.26 | 35.79 | 36.12 | 28.95 | |
| E439A | 1.89 | 0.64 | 33.70 | 1.44 | 0.48 | 33.06 | 33.38 | 28.95 | |
| E439C | 0.13 | 0.10 | 79.61 | 0.13 | 0.08 | 58.17 | 68.89 | 28.95 | 328 |
| E439F | 1.60 | 0.32 | 20.09 | 1.28 | 0.45 | 35.34 | 27.72 | 28.51 | |
| E439G | 1.35 | 0.44 | 32.26 | 1.31 | 0.34 | 25.57 | 28.92 | 28.51 | |
| E439H | 2.20 | 0.73 | 32.98 | 1.72 | 0.53 | 30.87 | 31.92 | 28.51 | |
| E439K | 0.48 | 0.22 | 46.48 | 0.50 | 0.26 | 52.55 | 49.51 | 28.51 | |
| E439L | 0.41 | 0.11 | 27.28 | 0.41 | 0.11 | 26.50 | 26.89 | 37.72 | |
| E439P | 1.48 | 0.46 | 31.31 | 1.16 | 0.26 | 22.27 | 26.79 | 28.51 | |
| E439Q | 2.34 | 0.45 | 19.31 | 1.77 | 0.51 | 29.13 | 24.22 | 28.51 | |
| E439S | 0.76 | 0.35 | 46.83 | 0.60 | 0.14 | 23.64 | 35.24 | 28.51 | |
| E439T | 1.23 | 0.58 | 46.88 | 1.16 | 0.77 | 66.25 | 56.57 | 35.74 | 370 |
| E439V | 1.30 | 0.61 | 47.15 | 1.19 | 0.44 | 37.06 | 42.11 | 35.74 | |
| E439W | 0.88 | 0.39 | 44.17 | 0.62 | 0.28 | 45.79 | 44.98 | 35.74 | |
| T440A | 1.59 | 0.61 | 38.22 | 0.97 | 0.44 | 45.19 | 41.71 | 35.74 | |
| T440D | 0.69 | 0.35 | 50.43 | 0.80 | 0.36 | 45.63 | 48.03 | 35.74 | |
| T440E | 0.68 | 0.21 | 30.75 | 0.75 | 0.20 | 27.15 | 28.95 | 23.27 | |
| T440F | 1.33 | 0.54 | 40.81 | 1.00 | 0.38 | 38.37 | 39.59 | 35.74 | |
| T440H | 0.83 | 0.26 | 31.52 | 0.97 | 0.26 | 27.24 | 29.38 | 23.27 | |
| T440I | 0.58 | 0.10 | 16.57 | 0.63 | 0.09 | 14.91 | 15.74 | 4.17 | |
| T440L | 1.35 | 0.28 | 20.86 | 1.18 | 0.41 | 34.56 | 27.71 | 35.74 | |
| T440M | 2.26 | 1.44 | 63.52 | 1.79 | 0.84 | 46.66 | 55.09 | 24.48 | 371 |
| T440P | 1.55 | 0.55 | 35.32 | 1.39 | 0.51 | 37.11 | 36.22 | 24.48 | |
| T440R | 1.11 | 0.38 | 33.69 | 1.15 | 0.40 | 34.72 | 34.21 | 24.48 | |
| T440S | 0.96 | 0.30 | 31.17 | 0.78 | 0.20 | 25.54 | 28.36 | 24.48 | |
| T440V | 0.63 | 0.19 | 30.02 | 0.84 | 0.23 | 27.83 | 28.92 | 23.27 | |
| T440Y | 0.98 | 0.08 | 7.63 | 0.92 | 0.29 | 30.95 | 19.29 | 24.48 | |
| E441A | 0.55 | 0.21 | 37.74 | 0.46 | 0.21 | 44.13 | 40.94 | 24.48 | |
| E441D | 1.17 | 0.35 | 29.59 | 0.92 | 0.29 | 31.40 | 30.50 | 24.48 | |
| E441F | 1.29 | 0.41 | 31.63 | 0.90 | 0.31 | 33.87 | 32.75 | 30.59 | |
| E441G | 0.47 | 0.02 | 4.06 | 0.48 | 0.09 | 17.92 | 10.99 | 33.76 | |
| E441H | 1.35 | 0.34 | 24.82 | 1.16 | 0.34 | 29.10 | 26.96 | 30.59 | |
| E441K | 0.98 | 0.26 | 26.77 | 0.76 | 0.26 | 34.56 | 30.66 | 30.59 | |
| E441L | 1.44 | 0.40 | 28.04 | 1.19 | 0.28 | 23.60 | 25.82 | 30.59 | |
| E441N | 2.35 | 0.53 | 22.61 | 1.64 | 0.64 | 39.21 | 30.91 | 30.59 | |
| E441S | 2.59 | 0.57 | 21.91 | 2.04 | 0.55 | 26.95 | 24.43 | 30.59 | |
| E441T | 2.33 | 0.70 | 30.18 | 2.26 | 3.17 | 140.00 | 85.09 | 18.62 | 176 |
| E441V | 0.33 | 0.21 | 61.73 | 0.54 | 0.29 | 52.58 | 57.16 | 18.62 | 373 |
| E441Y | 1.34 | 0.53 | 39.80 | 1.87 | 0.78 | 41.60 | 40.70 | 18.62 | |
| E442G | 0.91 | 0.36 | 39.55 | 1.16 | 0.56 | 47.72 | 43.64 | 18.62 | |
| E442K | 1.69 | 0.58 | 34.23 | 2.77 | 1.02 | 36.80 | 35.52 | 18.62 | |
| E442L | 1.20 | 0.40 | 33.36 | 1.47 | 0.11 | 7.12 | 20.24 | 18.62 | |
| E442P | 1.26 | 0.75 | 59.06 | 1.29 | 0.61 | 46.85 | 52.95 | 29.77 | 374 |
| E442Q | 1.40 | 0.68 | 48.43 | 1.34 | 0.46 | 34.16 | 41.29 | 29.77 | |
| E442R | 1.09 | 0.47 | 42.76 | 1.07 | 0.40 | 37.23 | 39.99 | 29.77 | |
| E442T | 0.54 | 0.25 | 46.31 | 0.46 | 0.20 | 43.37 | 44.84 | 29.77 | |
| E442V | 0.85 | 0.38 | 44.44 | 0.68 | 0.28 | 41.38 | 42.91 | 29.77 | |
| E442W | 0.34 | 0.12 | 36.30 | 0.40 | 0.13 | 32.21 | 34.25 | 23.27 | |
| E442Y | 0.50 | 0.24 | 48.14 | 0.38 | 0.17 | 45.38 | 46.76 | 29.77 | |
| P443A | 1.59 | 0.68 | 42.99 | 1.16 | 0.41 | 34.94 | 38.97 | 29.77 | |
| P443E | 1.73 | 0.84 | 48.34 | 1.10 | 0.43 | 38.74 | 43.54 | 29.77 | |
| P443F | 1.01 | 0.42 | 41.32 | 1.04 | 0.33 | 32.08 | 36.70 | 25.76 | |
| P443G | 1.45 | 0.50 | 34.29 | 1.39 | 0.43 | 30.80 | 32.54 | 25.76 | |
| P443H | 1.57 | 0.51 | 32.49 | 1.54 | 0.43 | 28.18 | 30.34 | 25.76 | |
| P443L | 0.45 | 0.03 | 7.51 | 0.47 | 0.04 | 8.14 | 7.83 | 33.76 | |
| P443M | 0.15 | 0.13 | 87.07 | 0.13 | 0.10 | 80.48 | 83.78 | 38.36 | 140 |
| P443N | 0.74 | 0.28 | 37.29 | 1.56 | 0.25 | 16.27 | 26.78 | 25.76 | |
| P443Q | 1.42 | 0.46 | 32.19 | 1.48 | 0.43 | 29.05 | 30.62 | 25.76 | |
| P443R | 1.06 | 0.35 | 33.11 | 1.13 | 0.32 | 28.39 | 30.75 | 25.76 | |
| P443S | 1.89 | 0.59 | 31.25 | 1.69 | 0.42 | 25.16 | 28.20 | 25.79 | |
| P443T | 1.46 | 0.42 | 28.50 | 1.51 | 0.34 | 22.77 | 25.63 | 25.79 | |
| P443W | 0.26 | 0.11 | 41.09 | 0.26 | 0.08 | 31.74 | 36.41 | 25.79 | |
| Q444E | 2.98 | 0.59 | 19.93 | 3.41 | 0.62 | 18.16 | 19.04 | 27.07 | |
| Q444F | 0.82 | 0.17 | 20.69 | 0.66 | 0.13 | 20.27 | 20.48 | 27.07 | |
| Q444G | 1.49 | 0.31 | 20.92 | 1.34 | 0.27 | 20.49 | 20.71 | 27.07 | |
| Q444H | 3.65 | 0.51 | 14.06 | 2.56 | 0.55 | 21.33 | 17.69 | 27.07 | |
| Q444I | 3.19 | 0.87 | 27.21 | 4.04 | 1.07 | 26.47 | 26.84 | 27.07 | |
| Q444K | 3.58 | 1.64 | 45.79 | 6.70 | 3.09 | 46.07 | 45.93 | 31.60 | |
| Q444N | 2.39 | 0.59 | 24.67 | 2.35 | 0.57 | 24.48 | 24.58 | 31.60 | |
| Q444R | 1.86 | 0.55 | 29.40 | 1.96 | 0.42 | 21.30 | 25.35 | 31.60 | |
| Q444W | 1.17 | 0.32 | 27.09 | 1.10 | 0.28 | 25.85 | 26.47 | 31.60 | |
| Q444Y | 0.87 | 0.22 | 24.73 | 0.71 | 0.20 | 28.24 | 26.48 | 31.60 | |
| I445A | 0.77 | 0.22 | 29.00 | 0.65 | 0.15 | 23.14 | 26.07 | 25.79 | |
| I445G | 2.53 | 0.58 | 22.83 | 2.24 | 0.45 | 20.05 | 21.44 | 25.79 | |
| I445L | 1.36 | 0.35 | 25.64 | 0.99 | 0.23 | 23.30 | 24.47 | 25.79 | |
| I445M | 2.18 | 0.52 | 23.98 | 2.12 | 0.37 | 17.47 | 20.72 | 25.79 | |
| I445N | 3.78 | 1.18 | 31.31 | 3.52 | 0.70 | 20.00 | 25.65 | 25.79 | |
| I445P | 2.64 | 0.64 | 24.15 | 2.30 | 0.68 | 29.69 | 26.92 | 29.86 | |
| I445Q | 2.24 | 0.58 | 25.77 | 2.08 | 0.49 | 23.38 | 24.57 | 29.86 | |
| I445R | 2.33 | 0.54 | 23.00 | 2.05 | 0.47 | 22.98 | 22.99 | 29.86 | |
| I445S | 2.79 | 0.65 | 23.47 | 2.17 | 0.48 | 22.04 | 22.76 | 29.86 | |
| I445T | 1.99 | 0.46 | 22.84 | 1.98 | 0.49 | 25.02 | 23.93 | 29.86 | |
| I445V | 1.92 | 0.43 | 22.22 | 2.03 | 0.43 | 21.00 | 21.61 | 29.86 | |
| I445W | 1.25 | 0.30 | 24.05 | 1.36 | 0.30 | 21.98 | 23.02 | 29.86 | |
| I445Y | 0.22 | 0.40 | 181.42 | 0.30 | 0.38 | 126.09 | 153.75 | 38.05 | 111 |
| F446A | 1.08 | 0.36 | 33.26 | 1.25 | 0.40 | 31.64 | 32.45 | 23.27 | |
| F446C | 0.17 | 0.16 | 92.20 | 0.19 | 0.16 | 85.60 | 88.90 | 36.18 | 235 |
| F446D | 1.58 | 0.93 | 58.67 | 1.56 | 1.07 | 68.78 | 63.72 | 36.18 | 289 |
| F446E | 0.39 | 0.22 | 56.56 | 0.36 | 0.26 | 70.47 | 63.51 | 36.18 | 238 |
| F446G | 0.22 | 0.13 | 61.47 | 0.25 | 0.16 | 62.30 | 61.88 | 36.18 | 239 |
| F446H | 2.29 | 0.79 | 34.59 | 1.80 | 0.61 | 34.00 | 34.29 | 26.04 | |
| F446I | 1.81 | 0.62 | 34.38 | 1.38 | 0.37 | 26.76 | 30.57 | 26.04 | |
| F446K | 1.80 | 0.62 | 34.27 | 1.78 | 0.49 | 27.59 | 30.93 | 26.04 | |
| F446L | 1.37 | 0.52 | 37.96 | 1.50 | 0.41 | 27.30 | 32.63 | 26.04 | |
| F446M | 1.76 | 0.88 | 50.16 | 1.49 | 0.57 | 38.51 | 44.33 | 26.04 | |
| F446Q | 1.66 | 0.60 | 36.36 | 1.69 | 0.50 | 29.79 | 33.07 | 26.04 | |
| F446R | 1.20 | 0.44 | 36.77 | 1.33 | 0.42 | 31.46 | 34.12 | 26.04 | |
| F446T | 2.32 | 0.94 | 40.32 | 2.55 | 0.62 | 24.14 | 32.23 | 26.04 | |
| F446V | 2.36 | 0.77 | 32.46 | 2.08 | 0.83 | 40.12 | 36.29 | 22.16 | |
| F446W | 1.31 | 0.51 | 38.84 | 1.43 | 0.72 | 50.09 | 44.46 | 23.27 | |
| Y447D | 0.55 | 0.30 | 54.28 | 0.51 | 0.29 | 56.95 | 55.61 | 21.73 | 381 |
| Y447E | 1.72 | 1.41 | 82.08 | 1.67 | 1.43 | 85.36 | 83.72 | 66.14 | 185 |
| Y447F | 1.20 | 0.60 | 50.00 | 1.38 | 0.68 | 49.20 | 49.60 | 25.82 | |
| Y447G | 0.46 | 0.79 | 172.56 | 0.50 | 0.74 | 147.11 | 159.83 | 66.14 | 86 |
| Y447I | 1.51 | 0.38 | 25.26 | 1.48 | 0.45 | 30.35 | 27.80 | 16.94 | |
| Y447L | 0.94 | 0.26 | 27.83 | 0.79 | 0.31 | 39.04 | 33.44 | 4.69 | |
| Y447M | 0.86 | 0.24 | 27.21 | 0.77 | 0.18 | 24.09 | 25.65 | 4.69 | |
| Y447N | 1.68 | 0.50 | 29.90 | 1.59 | 0.50 | 31.20 | 30.55 | 17.50 | |
| Y447P | 0.38 | 0.13 | 35.77 | 0.35 | 0.11 | 31.32 | 33.55 | 17.50 | |
| Y447Q | 1.20 | 0.37 | 31.16 | 1.29 | 0.36 | 28.02 | 29.59 | 17.50 | |
| Y447R | 0.93 | 0.30 | 32.47 | 1.04 | 0.27 | 25.74 | 29.11 | 17.50 | |
| Y447T | 0.95 | 0.34 | 35.93 | 0.93 | 0.33 | 35.63 | 35.78 | 17.50 | |
| Y447V | 0.90 | 0.29 | 31.76 | 0.89 | 0.31 | 35.00 | 33.38 | 17.50 | |

[0756] 2. Confirmation Screening

[0757] A confirmation screening was completed for 176 selected variants. The confirmation screen was performed as described above. The results are set forth in Table 11. The Table below sets forth the average OD for all tested transfection and duplicates of each sample at 4° C. and 52° C., and the average percent activity remaining at 52° C. compared to 4° C. (% Act. 52° C. vs. 4° C.). For comparison, the Table also sets forth the percent activity of wildtype (unmodified) PH20 control at 52° C. compared to 4° C. as tested in the same assay plate.

[0758] In the confirmation screening assay, the average PH20 activity of the tested variants at 4° C. was substantially lower for some of the tested variants than it was in the primary screening assay. This difference likely reflects lower expression of the transfected variants in the supernatants tested during the confirmation screening. For example, the variant N369H had an average activity normalized to SEAP expression of about 3.50 U/mL in the primary screen, but negligible to no activity in the confirmation screen. Other variants appeared to have expressed normally as evidenced by similar activities at 4° C. in the primary screen and confirmation screen.

TABLE 11
Confirmation Screen

| | | | Average | |
|---|---|---|---|---|
| | | | % Act. | % Act. wt |
| | Avg. Act. | Avg. Act. | 52° C. vs. | 52° C. vs. |
| Variant | 4° C. | 52° C. | 4° C. | 4° C. |
| N011G | 7.28 | 2.04 | 28.00 | 35.75 |
| L015V | 1.05 | 0.35 | 33.52 | 10.50 |
| L026S | 0.39 | 0.12 | 31.75 | 29.20 |
| G027E | 1.05 | 0.34 | 32.09 | 23.68 |
| G027H | 0.28 | 0.16 | 56.24 | 10.50 |
| F029E | 5.30 | 0.87 | 16.50 | 39.22 |
| V206I | 0.12 | 0.18 | 148.79 | 37.44 |
| F029S | 1.19 | 0.37 | 31.34 | 23.68 |
| D030A | 1.68 | 0.38 | 22.82 | 34.04 |
| S261A | 1.40 | 1.82 | 130.17 | 25.82 |
| E031G | 0.82 | 0.23 | 27.66 | 23.68 |
| E031L | 2.68 | 0.55 | 20.48 | 26.20 |
| P032Q | 0.74 | 0.21 | 27.63 | 10.50 |
| P032W | 0.24 | 0.12 | 49.90 | 17.47 |
| L033G | 0.36 | 0.05 | 14.89 | 31.45 |
| L033M | 0.31 | 0.14 | 46.35 | 17.47 |
| L033R | 0.76 | 0.23 | 30.43 | 34.04 |
| L033W | 0.69 | 0.17 | 24.96 | 31.45 |
| D034H | 0.46 | 0.10 | 21.79 | 31.45 |
| D034W | 0.19 | 0.10 | 52.51 | 39.22 |
| D284A | 0.13 | 0.15 | 116.73 | 37.44 |
| F038Y | 0.66 | 0.16 | 24.28 | 23.68 |
| S039R | 0.29 | 0.09 | 32.19 | 39.22 |
| S039T | 0.95 | 0.30 | 32.22 | 23.68 |
| I041T | 1.39 | 0.42 | 30.16 | 34.04 |
| I041W | 1.20 | 0.29 | 24.20 | 23.68 |
| F204P | 0.82 | 0.89 | 107.90 | 29.80 |
| G050D | 0.57 | 0.19 | 32.72 | 23.68 |
| G052N | 4.25 | 1.51 | 35.60 | 35.75 |
| G052T | 1.14 | 0.29 | 25.77 | 26.34 |
| T054N | 0.48 | 0.12 | 25.08 | 37.68 |
| V058K | 14.55 | 7.37 | 50.68 | 35.75 |
| Q143K | 0.22 | 0.22 | 100.23 | 37.44 |
| S315T | 0.21 | 0.20 | 98.79 | 26.20 |
| I067F | 0.61 | 0.28 | 45.25 | 37.44 |
| S069A | 1.10 | 0.32 | 29.20 | 17.47 |
| S069E | 0.71 | 0.22 | 30.67 | 37.68 |
| S069M | 1.47 | 0.58 | 39.78 | 35.75 |
| S069P | 1.00 | 0.39 | 38.96 | 37.68 |
| S069T | 0.41 | 0.18 | 44.17 | 23.68 |
| S069Y | 0.97 | 0.18 | 18.80 | 26.34 |
| I070A | 2.75 | 0.90 | 32.89 | 35.75 |
| I070C | 0.49 | 0.17 | 34.66 | 37.68 |
| V073H | 3.72 | 1.18 | 31.86 | 35.75 |
| V073Q | 2.03 | 0.82 | 40.49 | 37.68 |
| V073T | 0.80 | 0.27 | 33.27 | 26.34 |
| T074C | 0.45 | 0.16 | 35.29 | 37.68 |
| I083Q | 1.08 | 0.31 | 29.08 | 25.38 |
| S084D | 0.45 | 0.21 | 46.54 | 17.47 |
| Q086D | 0.72 | 0.32 | 44.39 | 29.80 |
| Q086R | 0.34 | 0.12 | 36.27 | 31.45 |
| D087P | 0.82 | 0.21 | 25.53 | 37.44 |
| D090W | 1.12 | 0.21 | 18.73 | 31.45 |
| A092V | 0.45 | 0.14 | 31.35 | 10.50 |
| K093E | 0.80 | 0.29 | 36.90 | 26.20 |
| K093S | 0.30 | 0.11 | 38.64 | 17.47 |
| T097F | 1.29 | 0.30 | 23.35 | 34.04 |
| F098M | 0.59 | 0.28 | 47.80 | 29.80 |
| V102H | 1.18 | 0.62 | 52.72 | 10.50 |
| N131C | 0.29 | 0.09 | 31.70 | 26.20 |
| N131L | 1.18 | 0.27 | 23.29 | 34.04 |
| Q138W | 0.33 | 0.09 | 26.77 | 25.38 |
| Q139V | 0.41 | 0.11 | 27.68 | 39.22 |
| N141M | 0.79 | 0.29 | 36.08 | 10.50 |
| N141Y | 0.33 | 0.18 | 53.86 | 26.20 |
| S215T | 0.26 | 0.25 | 96.58 | 35.75 |
| L144G | 0.17 | 0.09 | 53.87 | 39.22 |
| S235T | 0.21 | 0.17 | 79.02 | 26.20 |
| K152I | 2.40 | 0.55 | 22.79 | 39.22 |
| K152M | 0.52 | 0.19 | 35.93 | 23.68 |
| K154R | 2.36 | 0.57 | 24.16 | 22.21 |
| Q155A | 1.26 | 0.36 | 28.75 | 30.11 |
| Q155D | 0.32 | 0.17 | 53.99 | 17.47 |
| Q155F | 3.13 | 0.71 | 22.62 | 22.21 |
| Q155H | 0.56 | 0.19 | 33.63 | 10.50 |
| Q155L | 1.33 | 0.37 | 27.84 | 30.11 |
| Q155R | 2.13 | 0.49 | 22.83 | 30.11 |
| Q155S | 0.71 | 0.19 | 26.83 | 30.11 |
| K159A | 0.79 | 0.16 | 19.87 | 30.11 |
| K159H | 1.11 | 0.28 | 25.06 | 30.11 |
| F204P | 2.25 | 1.73 | 76.77 | 26.34 |
| K159Q | 0.45 | 0.16 | 34.68 | 29.80 |
| D163R | 0.39 | 0.19 | 49.03 | 22.21 |
| D163S | 1.18 | 0.30 | 25.15 | 23.68 |
| L165F | 1.16 | 0.59 | 50.62 | 29.80 |
| L174W | 0.21 | 0.12 | 56.63 | 39.22 |
| K195H | 0.92 | 0.39 | 41.93 | 29.20 |
| K195L | 0.68 | 0.27 | 39.79 | 29.20 |
| P197F | 0.41 | 0.10 | 24.97 | 29.20 |
| G198L | 0.31 | 0.15 | 48.80 | 10.50 |
| T147I | 0.28 | 0.20 | 73.68 | 29.80 |
| T306D | 0.32 | 0.24 | 73.42 | 29.80 |
| N205A | 0.26 | 0.15 | 57.01 | 17.47 |
| N205E | 2.55 | 1.07 | 42.03 | 35.75 |
| N205K | 0.82 | 0.20 | 25.00 | 17.47 |
| N205L | 0.58 | 0.27 | 47.23 | 17.47 |
| N205P | 2.35 | 1.05 | 44.82 | 35.75 |
| N205S | 1.57 | 0.62 | 39.63 | 37.68 |
| N205T | 1.05 | 0.38 | 36.30 | 37.68 |
| N369H | 0.26 | 0.19 | 72.15 | 29.80 |
| I208L | 1.29 | 0.33 | 25.72 | 37.68 |
| I208Q | 3.36 | 0.83 | 24.80 | 35.75 |
| I208R | 1.03 | 0.25 | 24.29 | 17.47 |
| D213E | 0.40 | 0.24 | 58.61 | 37.44 |
| D213N | 1.63 | 0.63 | 38.67 | 17.47 |
| S215A | 2.88 | 0.75 | 25.88 | 26.34 |
| S215D | 2.87 | 0.62 | 21.52 | 35.75 |
| S215E | 1.92 | 0.47 | 24.50 | 26.34 |
| S215H | 1.42 | 0.31 | 21.46 | 26.34 |
| S215L | 2.06 | 0.32 | 15.46 | 26.34 |
| S215Q | 1.16 | 0.23 | 19.96 | 26.34 |
| F029H | 0.31 | 0.21 | 69.98 | 26.20 |
| S215V | 4.77 | 0.98 | 20.56 | 35.75 |
| S215W | 1.80 | 0.35 | 19.39 | 26.34 |
| N219A | 2.33 | 0.37 | 15.87 | 26.34 |
| N219I | 1.47 | 0.34 | 22.99 | 35.75 |
| N219K | 5.75 | 1.64 | 28.52 | 35.75 |
| N219R | 1.49 | 0.36 | 24.54 | 37.68 |
| N219S | 2.38 | 0.51 | 21.53 | 37.68 |
| N219T | 1.45 | 0.26 | 17.65 | 37.68 |
| E220V | 6.88 | 3.92 | 57.06 | 35.75 |
| T222N | 0.21 | 0.08 | 37.71 | 29.20 |
| Q234M | 0.55 | 0.16 | 29.85 | 37.68 |
| R311G | 0.30 | 0.21 | 69.87 | 37.44 |
| V237Q | 3.00 | 0.78 | 26.12 | 22.21 |
| T240Q | 0.70 | 0.27 | 39.11 | 29.20 |
| I251L | 1.15 | 0.42 | 36.34 | 34.04 |
| I251M | 0.47 | 0.18 | 37.24 | 34.04 |
| A259K | 0.97 | 0.22 | 23.07 | 34.04 |
| A259P | 1.69 | 0.56 | 33.24 | 23.68 |
| A048G | 0.12 | 0.08 | 69.14 | 39.22 |
| R060K | 0.88 | 0.58 | 65.78 | 37.68 |
| L263T | 0.44 | 0.05 | 11.71 | 31.45 |
| V277A | 0.30 | 0.17 | 57.53 | 10.50 |
| V277C | 0.23 | 0.12 | 53.20 | 29.20 |
| L278N | 3.68 | 1.12 | 30.50 | 10.50 |
| S261F | 0.27 | 0.17 | 63.79 | 37.44 |
| D284Q | 1.25 | 0.38 | 30.24 | 34.04 |
| D284S | 0.32 | 0.16 | 50.31 | 22.21 |
| E285M | 0.38 | 0.05 | 12.27 | 29.20 |
| E292V | 1.10 | 0.31 | 27.77 | 31.45 |
| G305N | 0.45 | 0.16 | 35.35 | 29.20 |
| V058R | 3.03 | 1.91 | 63.06 | 35.75 |
| M310A | 5.89 | 1.49 | 25.34 | 26.34 |
| M310Q | 3.09 | 1.46 | 47.42 | 37.68 |
| K159N | 0.45 | 0.28 | 62.67 | 29.80 |
| A412S | 0.17 | 0.11 | 62.36 | 10.50 |
| L317N | 1.99 | 0.57 | 28.49 | 22.21 |
| S342A | 1.67 | 0.37 | 22.12 | 39.22 |
| D368H | 0.30 | 0.02 | 5.19 | 30.11 |
| D030P | 0.31 | 0.19 | 61.80 | 23.68 |
| G377T | 2.66 | 0.65 | 24.43 | 37.44 |
| K379H | 0.50 | 0.22 | 44.48 | 29.80 |
| K379S | 0.22 | 0.00 | 0.00 | 39.22 |
| K379T | 0.36 | 0.13 | 35.05 | 29.80 |
| F380I | 0.64 | 0.17 | 26.31 | 39.22 |
| F380L | 0.49 | 0.25 | 51.08 | 37.44 |
| F380P | 0.42 | 0.20 | 47.78 | 29.80 |
| S401G | 1.67 | 0.58 | 34.50 | 37.68 |
| L406N | 0.54 | 0.26 | 48.24 | 37.44 |
| S407F | 0.23 | 0.04 | 18.12 | 25.38 |
| E410S | 1.08 | 0.33 | 30.44 | 34.04 |
| A412P | 1.40 | 0.34 | 24.04 | 22.21 |
| L037K | 0.22 | 0.13 | 60.05 | 34.04 |
| V428P | 0.58 | 0.19 | 32.09 | 17.47 |
| D431A | 0.91 | 0.31 | 34.50 | 10.50 |
| F433T | 2.56 | 0.68 | 26.73 | 25.38 |
| M438A | 0.59 | 0.24 | 40.75 | 10.50 |
| E441T | 1.23 | 0.32 | 26.10 | 34.04 |
| I445Y | 0.85 | 0.31 | 37.03 | 31.45 |
| F446C | 0.95 | 0.30 | 31.78 | 26.20 |
| F446D | 2.68 | 0.83 | 31.08 | 34.04 |
| F446E | 1.08 | 0.22 | 20.33 | 39.22 |
| F446G | 0.76 | 0.16 | 20.41 | 23.68 |
| Y447E | 0.94 | 0.44 | 46.49 | 29.80 |
| Y447G | 0.62 | 0.08 | 12.29 | 30.11 |

[0759] Since modifications will be apparent to those of skill in the art, it is intended that this invention be limited only by the scope of the appended claims.

1. A modified PH20 polypeptide that is an uber-thermophile exhibiting thermal stability, wherein:
the modified PH20 polypeptide comprises an amino acid replacement in an unmodified PH20 polypeptide, whereby the polypeptide retains at least 50% of its hyaluronidase activity at neutral pH after incubation at 52° C. for 10 minutes compared to its hyaluronidase activity after incubation at 4° C. for 10 minutes; and
the unmodified PH20 polypeptide consists of the sequence of amino acids set forth in SEQ ID NO: 7 or is a C-terminal truncated fragment thereof that is a soluble PH20 polypeptide or a sequence of amino acids that has at least 85% sequence identity to SEQ ID NO:7 or a C-terminal truncated fragment thereof that is soluble.

2. The modified PH20 polypeptide of claim 1, comprising at least one amino acid replacement at an amino acid position corresponding to a position selected from among 10, 11, 13, 15, 26, 27, 28, 29, 30, 31, 32, 33, 34, 36, 37, 38, 39, 41, 46, 47, 48, 49, 50, 58, 60, 67, 69, 72, 73, 83, 84, 86, 87, 90, 92, 93, 94, 97, 98, 99, 102, 105, 114, 118, 120, 131, 132, 135, 138, 139, 141, 142, 143, 144, 146, 147, 148, 150, 151, 152, 154, 155, 156, 158, 159, 160, 161, 162, 163, 165, 170, 174, 195, 196, 197, 198, 202, 204, 205, 206, 208, 213, 215, 219, 220, 222, 234, 235, 237, 240, 247, 251, 255, 259, 260, 261, 263, 265, 271, 276, 277, 278, 282, 284, 285, 290, 292, 305, 306, 309, 310, 311, 315, 317, 318, 320, 321, 328, 342, 343, 349, 359, 368, 369, 371, 373, 374, 375, 376, 377, 379, 380, 388, 389, 393, 399, 401, 403, 406, 407, 410, 412, 413, 415, 417, 419, 421, 428, 431, 433, 434, 435, 438, 439, 440, 441, 442, 443, 445, 446 and 447, with reference to amino acid positions of the sequence set forth in SEQ ID NO:3, wherein corresponding amino acid positions are identified by alignment of the PH20 polypeptide with the polypeptide set forth in SEQ ID NO:3.

3. The modified PH20 polypeptide of claim 2, wherein the replacement is an amino acid replacement selected from among:
at a position corresponding to position 10, replacement with G or N;
at a position corresponding to position 11, replacement with G;
at a position corresponding to position 13, replacement with H;
at a position corresponding to position 15, replacement with A or V;
at a position corresponding to position 26, replacement with P, R, S, V, W or Y;
at a position corresponding to position 27, replacement with E or H;
at a position corresponding to position 28, replacement with L;
at a position corresponding to position 29, replacement with E, H, L, S or W;
at a position corresponding to position 30, replacement with A, P or R;
at a position corresponding to position 31, replacement with C, G or L;
at a position corresponding to position 32, replacement with Q, S, V or W;
at a position corresponding to position 33, replacement with G, M, R or W;
at a position corresponding to position 34, replacement with E, H or W;
at a position corresponding to position 36, replacement with G;
at a position corresponding to position 37, replacement with I or K;
at a position corresponding to position 38, replacement with Y;
at a position corresponding to position 39, replacement with Q, R or T;
at a position corresponding to position 41, replacement with D, T or W;
at a position corresponding to position 46, replacement with H;
at a position corresponding to position 47, replacement with G or R;
at a position corresponding to position 48, replacement with G or Y;
at a position corresponding to position 49, replacement with I;
at a position corresponding to position 50, replacement with C or D;
at a position corresponding to position 58, replacement with K or R;
at a position corresponding to position 60, replacement with K;
at a position corresponding to position 67, replacement with F;
at a position corresponding to position 69, replacement with A or Y;
at a position corresponding to position 72, replacement with D;
at a position corresponding to position 73, replacement with T;
at a position corresponding to position 83, replacement with G, Q or V;
at a position corresponding to position 84, replacement with D;
at a position corresponding to position 86, replacement with D, E, N or R;
at a position corresponding to position 87, replacement with M, P or V;
at a position corresponding to position 90, replacement with E, T or W;
at a position corresponding to position 92, replacement with V;
at a position corresponding to position 93, replacement with E or S;
at a position corresponding to position 94, replacement with N;
at a position corresponding to position 97, replacement with E or F;
at a position corresponding to position 98, replacement with M;
at a position corresponding to position 99, replacement with S;
at a position corresponding to position 102, replacement with H or N;
at a position corresponding to position 105, replacement with I, R or W;
at a position corresponding to position 114, replacement with G;
at a position corresponding to position 118, replacement with M;
at a position corresponding to position 120, replacement with S;
at a position corresponding to position 131, replacement with C or L;
at a position corresponding to position 132, replacement with A or C;
at a position corresponding to position 135, replacement with Q;
at a position corresponding to position 138, replacement with W;
at a position corresponding to position 139, replacement with R or V;
at a position corresponding to position 141, replacement with M, Q, W or Y;
at a position corresponding to position 142, replacement with Q;
at a position corresponding to position 143, replacement with K;
at a position corresponding to position 144, replacement with G;
at a position corresponding to position 146, replacement with V;
at a position corresponding to position 147, replacement with G, I or M;
at a position corresponding to position 148, replacement with C, H or K;
at a position corresponding to position 150, replacement with L;
at a position corresponding to position 151, replacement with Q;
at a position corresponding to position 152, replacement with A, I, M or T;
at a position corresponding to position 154, replacement with R;
at a position corresponding to position 155, replacement with A, D, F, H, L, R, S or V;
at a position corresponding to position 156, replacement with A, C or Q;
at a position corresponding to position 158, replacement with H;
at a position corresponding to position 159, replacement with A, H, N, Q or S;
at a position corresponding to position 160, replacement with Y;
at a position corresponding to position 161, replacement with A or D;
at a position corresponding to position 162, replacement with L;
at a position corresponding to position 163, replacement with K, R or S;
at a position corresponding to position 165, replacement with F;
at a position corresponding to position 170, replacement with R;
at a position corresponding to position 174, replacement with W;
at a position corresponding to position 195, replacement with H, L or N;
at a position corresponding to position 196, replacement with T;
at a position corresponding to position 197, replacement with F;
at a position corresponding to position 198, replacement with L;
at a position corresponding to position 202, replacement with M;
at a position corresponding to position 204, replacement with P;
at a position corresponding to position 205, replacement with A, E, K, L, P, S or T;
at a position corresponding to position 206, replacement with I;
at a position corresponding to position 208, replacement with L, Q or R;
at a position corresponding to position 213, replacement with E or N;
at a position corresponding to position 215, replacement with A, D, E, H, T, V or W;
at a position corresponding to position 219, replacement with A, R, S or T;
at a position corresponding to position 220, replacement with V;
at a position corresponding to position 222, replacement with N;
at a position corresponding to position 234, replacement with M;
at a position corresponding to position 235, replacement with T;
at a position corresponding to position 237, replacement with Q;
at a position corresponding to position 240, replacement with Q;
at a position corresponding to position 247, replacement with I;
at a position corresponding to position 251, replacement with L or M;
at a position corresponding to position 255, replacement with R;
at a position corresponding to position 259, replacement with K or P;
at a position corresponding to position 260, replacement with G or M;
at a position corresponding to position 261, replacement with A or F;
at a position corresponding to position 263, replacement with T;
at a position corresponding to position 265, replacement with I;
at a position corresponding to position 271, replacement with V;
at a position corresponding to position 276, replacement with E;
at a position corresponding to position 277, replacement with A, C, E or H;
at a position corresponding to position 278, replacement with G, H, K or N;
at a position corresponding to position 282, replacement with G or Q;
at a position corresponding to position 284, replacement with A, Q or S;
at a position corresponding to position 285, replacement with M or Y;
at a position corresponding to position 290, replacement with M;
at a position corresponding to position 292, replacement with V;
at a position corresponding to position 305, replacement with D or N;
at a position corresponding to position 306, replacement with D;
at a position corresponding to position 309, replacement with E, H or L;
at a position corresponding to position 310, replacement with Q or R;
at a position corresponding to position 311, replacement with G or K;
at a position corresponding to position 315, replacement with T;
at a position corresponding to position 317, replacement with N;
at a position corresponding to position 318, replacement with K, M, N or Q;
at a position corresponding to position 320, replacement with R;
at a position corresponding to position 321, replacement with A, H or R;
at a position corresponding to position 328, replacement with L or R;
at a position corresponding to position 342, replacement with A;
at a position corresponding to position 343, replacement with V;
at a position corresponding to position 349, replacement with A or E;
at a position corresponding to position 359, replacement with E;
at a position corresponding to position 368, replacement with H or K;
at a position corresponding to position 369, replacement with H;
at a position corresponding to position 371, replacement with E, F, M or T;
at a position corresponding to position 373, replacement with S;
at a position corresponding to position 374, replacement with A or V;
at a position corresponding to position 375, replacement with T;
at a position corresponding to position 376, replacement with Y;
at a position corresponding to position 377, replacement with T;
at a position corresponding to position 379, replacement with H, S or T;
at a position corresponding to position 380, replacement with I, L, P, T or V;
at a position corresponding to position 388, replacement with H;
at a position corresponding to position 389, replacement with K;
at a position corresponding to position 393, replacement with L;
at a position corresponding to position 399, replacement with R or W;
at a position corresponding to position 401, replacement with G;
at a position corresponding to position 403, replacement with F;
at a position corresponding to position 406, replacement with N;
at a position corresponding to position 407, replacement with F, H, M, P or Q;
at a position corresponding to position 410, replacement with S;
at a position corresponding to position 412, replacement with G, P or S;
at a position corresponding to position 413, replacement with Q or T;
at a position corresponding to position 415, replacement with W;
at a position corresponding to position 417, replacement with L;
at a position corresponding to position 419, replacement with L;
at a position corresponding to position 421, replacement with I or M;
at a position corresponding to position 428, replacement with P;
at a position corresponding to position 431, replacement with A or G;
at a position corresponding to position 433, replacement with L or T;
at a position corresponding to position 434, replacement with I or M;
at a position corresponding to position 435, replacement with H;
at a position corresponding to position 438, replacement with A;
at a position corresponding to position 439, replacement with C or T;
at a position corresponding to position 440, replacement with M;
at a position corresponding to position 441, replacement with T or V;
at a position corresponding to position 442, replacement with P;
at a position corresponding to position 443, replacement with M;
at a position corresponding to position 445, replacement with Y;
at a position corresponding to position 446, replacement with C, D, E or G; and
at a position corresponding to position 447, replacement with D, E or G, each with reference to amino acid positions of the sequence set forth in SEQ ID NO:3.

4. The modified PH20 polypeptide of claim 1, wherein the modified PH20 polypeptide retains at least 60%, 65%, 70%, 75%, 80%, 85%, 90%, 95% or more of its hyaluronidase activity after incubation at 52° C. for 10 minutes compared to its hyaluronidase activity after incubation at 4° C. for 10 minutes.

5. The modified PH20 polypeptide of claim 1, comprising at least one amino acid replacement selected from among replacement with: glycine (G) at a position corresponding to position 11; A at a position corresponding to position 15; V at a position corresponding to position 15; R at a position corresponding to position 26; S at a position corresponding to position 26; E at a position corresponding to position 27; H at a position corresponding to position 27; H at a position corresponding to position 29; S at a position corresponding to position 29; A at a position corresponding to position 30; P at a position corresponding to position 30; G at a position corresponding to position 31; L at a position corresponding to position 31; Q at a position corresponding to position 32; W at a position corresponding to position 32; G at a position corresponding to position 33; M at a position corresponding to position 33; R at a position corresponding to position 33; W at a position corresponding to position 33; E at a position corresponding to position 34; H at a position corresponding to position 34; W at a position corresponding to position 34; K at a position corresponding to position 37; Y at a position corresponding to position 38; Q at a position corresponding to position 39; R at a position corresponding to position 39; T at a position corresponding to position 39; D at a position corresponding to position 41; T at a position corresponding to position 41; W at a position corresponding to position 41; G at a position corresponding to position 48; C at a position corresponding to position 50; D at a position corresponding to position 50; K at a position corresponding to position 58; R at a position corresponding to position 58; K at a position corresponding to position 60; F at a position corresponding to position 67; A at a position corresponding to position 69; Y at a position corresponding to position 69; Q at a position corresponding to position 83; D at a position corresponding to position 84; D at a position corresponding to position 86; E at a position corresponding to position 86; R at a position corresponding to position 86; P at a position corresponding to position 87; W at a position corresponding to position 90; V at a position corresponding to position 92; E at a position corresponding to position 93; S at a position corresponding to position 93; N at a position corresponding to position 94; F at a position corresponding to position 97; M at a position corresponding to position 98; S at a position corresponding to position 99; H at a position corresponding to position 102; G at a position corresponding to position 114; M at a position corresponding to position 118; S at a position corresponding to position 120; C at a position corresponding to position 131; L at a position corresponding to position 131; A at a position corresponding to position 132; W at a position corresponding to position 138; R at a position corresponding to position 139; V at a position corresponding to position 139; M at a position corresponding to position 141; Y at a position corresponding to position 141; K at a position corresponding to position 143; G at a position corresponding to position 144; V at a position corresponding to position 146; I at a position corresponding to position 147; M at a position corresponding to position 147; C at a position corresponding to position 148; H at a position corresponding to position 148; K at a position corresponding to position 148; L at a position corresponding to position 150; Q at a position corresponding to position 151; I at a position corresponding to position 152; M at a position corresponding to position 152; T at a position corresponding to position 152; R at a position corresponding to position 154; A at a position corresponding to position 155; D at a position corresponding to position 155; F at a position corresponding to position 155; H at a position corresponding to position 155; L at a position corresponding to position 155; R at a position corresponding to position 155; S at a position corresponding to position 155; H at a position corresponding to position 158; A at a position corresponding to position 159; H at a position corresponding to position 159; N at a position corresponding to position 159; Q at a position corresponding to position 159; S at a position corresponding to position 159; Y at a position corresponding to position 160; A at a position corresponding to position 161; L at a position corresponding to position 162; K at a position corresponding to position 163; R at a position corresponding to position 163; S at a position corresponding to position 163; F at a position corresponding to position 165; W at a position corresponding to position 174; H at a position corresponding to position 195; L at a position corresponding to position 195; T at a position corresponding to position 196; F at a position corresponding to position 197; L at a position corresponding to position 198; P at a position corresponding to position 204; A at a position corresponding to position 205; E at a position corresponding to position 205; K at a position corresponding to position 205; L at a position corresponding to position 205; T at a position corresponding to position 205; I at a position corresponding to position 206; Q at a position corresponding to position 208; R at a position corresponding to position 208; E at a position corresponding to position 213; N at a position corresponding to position 213; E at a position corresponding to position 215; H at a position corresponding to position 215; T at a position corresponding to position 215; N at a position corresponding to position 222; T at a position corresponding to position 235; Q at a position corresponding to position 237; Q at a position corresponding to position 240; I at a position corresponding to position 247; L at a position corresponding to position 251; Mat a position corresponding to position 251; K at a position corresponding to position 259; P at a position corresponding to position 259; M at a position corresponding to position 260; A at a position corresponding to position 261; F at a position corresponding to position 261; T at a position corresponding to position 263; V at a position corresponding to position 271; Eat a position corresponding to position 276; A at a position corresponding to position 277; C at a position corresponding to position 277; N at a position corresponding to position 278; Q at a position corresponding to position 282; A at a position corresponding to position 284; Q at a position corresponding to position 284; S at a position corresponding to position 284; M at a position corresponding to position 285; V at a position corresponding to position 292; N at a position corresponding to position 305; D at a position corresponding to position 306; R at a position corresponding to position 310; G at a position corresponding to position 311; T at a position corresponding to position 315; N at a position corresponding to position 317; A at a position corresponding to position 321; R at a position corresponding to position 321; L at a position corresponding to position 328; R at a position corresponding to position 328; A at a position corresponding to position 342; H at a position corresponding to position 368; K at a position corresponding to position 368; H at a position corresponding to position 369; F at a position corresponding to position 371; S at a position corresponding to position 373; T at a position corresponding to position 377; H at a position corresponding to position 379; S at a position corresponding to position 379; T at a position corresponding to position 379; I at a position corresponding to position 380; L at a position corresponding to position 380; P at a position corresponding to position 380; T at a position corresponding to position 380; H at a position corresponding to position 388; N at a position corresponding to position 406; F at a position corresponding to position 407; Q at a position corresponding to position 407; S at a position corresponding to position 410; G at a position corresponding to position 412; P at a position corresponding to position 412; S at a position corresponding to position 412; Q at a position corresponding to position 413; M at a position corresponding to position 421; P at a position corresponding to position 428; A at a position corresponding to position 431; L at a position corresponding to position 433; T at a position corresponding to position 433; A at a position corresponding to position 438; C at a position corresponding to position 439; T at a position corresponding to position 441; M at a position corresponding to position 443; Y at a position corresponding to position 445; C at a position corresponding to position 446; D at a position corresponding to position 446; E at a position corresponding to position 446; G at a position corresponding to position 446; E at a position corresponding to position 447; and G at a position corresponding to position 447, with reference to amino acid residue positions of the sequence set forth in SEQ ID NO:3.

6. The modified PH20 polypeptide of claim 1 that contains 1, 2, 3, 4, 5, 6, 7, 8, 9, 10, 11, 12, 13, 14, 15, 16, 17, 18, 19 or 20 amino acid replacements compared to the unmodified PH20 polypeptide.

7. The modified PH20 polypeptide of claim 6, comprising at least 2 amino acid replacements selected from among replacement with: glycine (G) at a position corresponding to position 11; A at a position corresponding to position 15; V at a position corresponding to position 15; R at a position corresponding to position 26; S at a position corresponding to position 26; E at a position corresponding to position 27; H at a position corresponding to position 27; H at a position corresponding to position 29; S at a position corresponding to position 29; A at a position corresponding to position 30; P at a position corresponding to position 30; G at a position corresponding to position 31; L at a position corresponding to position 31; Q at a position corresponding to position 32; W at a position corresponding to position 32; G at a position corresponding to position 33; M at a position corresponding to position 33; R at a position corresponding to position 33; W at a position corresponding to position 33; E at a position corresponding to position 34; H at a position corresponding to position 34; W at a position corresponding to position 34; K at a position corresponding to position 37; Y at a position corresponding to position 38; Q at a position corresponding to position 39; R at a position corresponding to position 39; T at a position corresponding to position 39; D at a position corresponding to position 41; T at a position corresponding to position 41; W at a position corresponding to position 41; G at a position corresponding to position 48; C at a position corresponding to position 50; D at a position corresponding to position 50; K at a position corresponding to position 58; R at a position corresponding to position 58; K at a position corresponding to position 60; F at a position corresponding to position 67; A at a position corresponding to position 69; Y at a position corresponding to position 69; Q at a position corresponding to position 83; D at a position corresponding to position 84; D at a position corresponding to position 86; E at a position corresponding to position 86; R at a position corresponding to position 86; P at a position corresponding to position 87; W at a position corresponding to position 90; V at a position corresponding to position 92; E at a position corresponding to position 93; S at a position corresponding to position 93; N at a position corresponding to position 94; F at a position corresponding to position 97; M at a position corresponding to position 98; S at a position corresponding to position 99; H at a position corresponding to position 102; G at a position corresponding to position 114; M at a position corresponding to position 118; S at a position corresponding to position 120; C at a position corresponding to position 131; L at a position corresponding to position 131; A at a position corresponding to position 132; W at a position corresponding to position 138; R at a position corresponding to position 139; V at a position corresponding to position 139; M at a position corresponding to position 141; Y at a position corresponding to position 141; K at a position corresponding to position 143; G at a position corresponding to position 144; V at a position corresponding to position 146; I at a position corresponding to position 147; M at a position corresponding to position 147; C at a position corresponding to position 148; H at a position corresponding to position 148; K at a position corresponding to position 148; L at a position corresponding to position 150; Q at a position corresponding to position 151; I at a position corresponding to position 152; M at a position corresponding to position 152; T at a position corresponding to position 152; R at a position corresponding to position 154; A at a position corresponding to position 155; D at a position corresponding to position 155; F at a position corresponding to position 155; H at a position corresponding to position 155; L at a position corresponding to position 155; R at a position corresponding to position 155; S at a position corresponding to position 155; H at a position corresponding to position 158; A at a position corresponding to position 159; H at a position corresponding to position 159; N at a position corresponding to position 159; Q at a position corresponding to position 159; S at a position corresponding to position 159; Y at a position corresponding to position 160; A at a position corresponding to position 161; L at a position corresponding to position 162; K at a position corresponding to position 163; R at a position corresponding to position 163; S at a position corresponding to position 163; F at a position corresponding to position 165; W at a position corresponding to position 174; H at a position corresponding to position 195; L at a position corresponding to position 195; T at a position corresponding to position 196; F at a position corresponding to position 197; L at a position corresponding to position 198; P at a position corresponding to position 204; A at a position corresponding to position 205; E at a position corresponding to position 205; K at a position corresponding to position 205; L at a position corresponding to position 205; T at a position corresponding to position 205; I at a position corresponding to position 206; Q at a position corresponding to position 208; R at a position corresponding to position 208; E at a position corresponding to position 213; N at a position corresponding to position 213; E at a position corresponding to position 215; H at a position corresponding to position 215; T at a position corresponding to position 215; N at a position corresponding to position 222; T at a position corresponding to position 235; Q at a position corresponding to position 237; Q at a position corresponding to position 240; I at a position corresponding to position 247; L at a position corresponding to position 251; M at a position corresponding to position 251; K at a position corresponding to position 259; P at a position corresponding to position 259; M at a position corresponding to position 260; A at a position corresponding to position 261; F at a position corresponding to position 261; T at a position corresponding to position 263; V at a position corresponding to position 271; E at a position corresponding to position 276; A at a position corresponding to position 277; C at a position corresponding to position 277; N at a position corresponding to position 278; Q at a position corresponding to position 282; A at a position corresponding to position 284; Q at a position corresponding to position 284; S at a position corresponding to position 284; M at a position corresponding to position 285; V at a position corresponding to position 292; N at a position corresponding to position 305; D at a position corresponding to position 306; R at a position corresponding to position 310; G at a position corresponding to position 311; Tat a position corresponding to position 315; N at a position corresponding to position 317; A at a position corresponding to position 321; R at a position corresponding to position 321; L at a position corresponding to position 328; R at a position corresponding to position 328; A at a position corresponding to position 342; H at a position corresponding to position 368; K at a position corresponding to position 368; H at a position corresponding to position 369; F at a position corresponding to position 371; S at a position corresponding to position 373; T at a position corresponding to position 377; H at a position corresponding to position 379; S at a position corresponding to position 379; T at a position corresponding to position 379; I at a position corresponding to position 380; L at a position corresponding to position 380; P at a position corresponding to position 380; T at a position corresponding to position 380; H at a position corresponding to position 388; N at a position corresponding to position 406; F at a position corresponding to position 407; Q at a position corresponding to position 407; S at a position corresponding to position 410; G at a position corresponding to position 412; P at a position corresponding to position 412; S at a position corresponding to position 412; Q at a position corresponding to position 413; M at a position corresponding to position 421; P at a position corresponding to position 428; A at a position corresponding to position 431; L at a position corresponding to position 433; T at a position corresponding to position 433; A at a position corresponding to position 438; C at a position corresponding to position 439; T at a position corresponding to position 441; M at a position corresponding to position 443; Y at a position corresponding to position 445; C at a position corresponding to position 446; D at a position corresponding to position 446; E at a position corresponding to position 446; G at a position corresponding to position 446; E at a position corresponding to position 447; and G at a position corresponding to position 447, with reference to amino acid residue positions of the sequence set forth in SEQ ID NO:3.

8. The modified PH20 polypeptide of claim 1, wherein the amino acid replacement(s) is/are selected from among replacement with: alanine (A) at a position corresponding to position 15; V at a position corresponding to position 15; R at a position corresponding to position 26; E at a position corresponding to position 27; S at a position corresponding to position 29; G at a position corresponding to position 31; L at a position corresponding to position 31; Q at a position corresponding to position 32; G at a position corresponding to position 33; M at a position corresponding to position 33; R at a position corresponding to position 33; W at a position corresponding to position 33; E at a position corresponding to position 34; H at a position corresponding to position 34; Y at a position corresponding to position 38; R at a position corresponding to position 39; W at a position corresponding to position 41; G at a position corresponding to position 48; C at a position corresponding to position 50; R at a position corresponding to position 58; A at a position corresponding to position 69; D at a position corresponding to position 86; E at a position corresponding to position 86; R at a position corresponding to position 86; W at a position corresponding to position 90; E at a position corresponding to position 93; S at a position corresponding to position 93; F at a position corresponding to position 97; S at a position corresponding to position 99; S at a position corresponding to position 120; L at a position corresponding to position 131; A at a position corresponding to position 132; W at a position corresponding to position 138; R at a position corresponding to position 139; V at a position corresponding to position 139; M at a position corresponding to position 141; Y at a position corresponding to position 141; K at a position corresponding to position 143; V at a position corresponding to position 146; I at a position corresponding to position 147; M at a position corresponding to position 147; C at a position corresponding to position 148; H at a position corresponding to position 148; K at a position corresponding to position 148; L at a position corresponding to position 150; Q at a position corresponding to position 151; I at a position corresponding to position 152; M at a position corresponding to position 152; T at a position corresponding to position 152; R at a position corresponding to position 154; A at a position corresponding to position 155; F at a position corresponding to position 155; L at a position corresponding to position 155; R at a position corresponding to position 155; H at a position corresponding to position 158; H at a position corresponding to position 159; N at a position corresponding to position 159; Q at a position corresponding to position 159; S at a position corresponding to position 159; Y at a position corresponding to position 160; R at a position corresponding to position 163; F at a position corresponding to position 165; W at a position corresponding to position 174; L at a position corresponding to position 198; P at a position corresponding to position 204; A at a position corresponding to position 205; L at a position corresponding to position 205; T at a position corresponding to position 205; I at a position corresponding to position 206; Q at a position corresponding to position 208; R at a position corresponding to position 208; N at a position corresponding to position 213; E at a position corresponding to position 215; T at a position corresponding to position 215; T at a position corresponding to position 235; Q at a position corresponding to position 237; Q at a position corresponding to position 240; L at a position corresponding to position 251; K at a position corresponding to position 259; M at a position corresponding to position 260; A at a position corresponding to position 261; F at a position corresponding to position 261; T at a position corresponding to position 263; V at a position corresponding to position 271; E at a position corresponding to position 276; A at a position corresponding to position 277; C at a position corresponding to position 277; A at a position corresponding to position 284; Q at a position corresponding to position 284; S at a position corresponding to position 284; V at a position corresponding to position 292; N at a position corresponding to position 305; D at a position corresponding to position 306; R at a position corresponding to position 310; T at a position corresponding to position 315; R at a position corresponding to position 328; A at a position corresponding to position 342; K at a position corresponding to position 368; H at a position corresponding to position 369; S at a position corresponding to position 373; H at a position corresponding to position 379; S at a position corresponding to position 379; T at a position corresponding to position 379; I at a position corresponding to position 380; L at a position corresponding to position 380; P at a position corresponding to position 380; T at a position corresponding to position 380; H at a position corresponding to position 388; G at a position corresponding to position 412; P at a position corresponding to position 412; S at a position corresponding to position 412; Q at a position corresponding to position 413; T at a position corresponding to position 433; A at a position corresponding to position 438; T at a position corresponding to position 441; M at a position corresponding to position 443; Y at a position corresponding to position 445; C at a position corresponding to position 446; E at a position corresponding to position 447; and G at a position corresponding to position 447, with reference to amino acid residue positions of the sequence set forth in SEQ ID NO: 3.

9. The modified PH20 polypeptide of claim 1, wherein the amino acid replacement(s) is/are selected from among replacement with: alanine (A) at a position corresponding to position 15; V at a position corresponding to position 15; R at a position corresponding to position 26; E at a position corresponding to position 27; S at a position corresponding to position 29; G at a position corresponding to position 31; G at a position corresponding to position 33; M at a position corresponding to position 33; R at a position corresponding to position 33; W at a position corresponding to position 33; E at a position corresponding to position 34; H at a position corresponding to position 34; Y at a position corresponding to position 38; R at a position corresponding to position 39; G at a position corresponding to position 48; R at a position corresponding to position 86; W at a position corresponding to position 90; E at a position corresponding to position 93; S at a position corresponding to position 93; F at a position corresponding to position 97; S at a position corresponding to position 120; L at a position corresponding to position 131; A at a position corresponding to position 132; R at a position corresponding to position 139; M at a position corresponding to position 141; Y at a position corresponding to position 141; K at a position corresponding to position 143; I at a position corresponding to position 147; M at a position corresponding to position 147; C at a position corresponding to position 148; H at a position corresponding to position 148; K at a position corresponding to position 148; M at a position corresponding to position 152; T at a position corresponding to position 152; R at a position corresponding to position 154; A at a position corresponding to position 155; F at a position corresponding to position 155; L at a position corresponding to position 155; N at a position corresponding to position 159; S at a position corresponding to position 159; Y at a position corresponding to position 160; R at a position corresponding to position 163; F at a position corresponding to position 165; W at a position corresponding to position 174; L at a position corresponding to position 198; P at a position corresponding to position 204; A at a position corresponding to position 205; L at a position corresponding to position 205; T at a position corresponding to position 205; I at a position corresponding to position 206; R at a position corresponding to position 208; N at a position corresponding to position 213; E at a position corresponding to position 215; T at a position corresponding to position 215; Q at a position corresponding to position 240; L at a position corresponding to position 251; K at a position corresponding to position 259; M at a position corresponding to position 260; A at a position corresponding to position 261; F at a position corresponding to position 261; T at a position corresponding to position 263; V at a position corresponding to position 271; A at a position corresponding to position 277; C at a position corresponding to position 277; A at a position corresponding to position 284; Q at a position corresponding to position 284; S at a position corresponding to position 284; V at a position corresponding to position 292; T at a position corresponding to position 315; A at a position corresponding to position 342; H at a position corresponding to position 369; H at a position corresponding to position 379; S at a position corresponding to position 379; T at a position corresponding to position 379; L at a position corresponding to position 380; P at a position corresponding to position 380; T at a position corresponding to position 380; H at a position corresponding to position 388; G at a position corresponding to position 412; P at a position corresponding to position 412; S at a position corresponding to position 412; T at a position corresponding to position 433; A at a position corresponding to position 438; T at a position corresponding to position 441; M at a position corresponding to position 443; Y at a position corresponding to position 445; C at a position corresponding to position 446; E at a position corresponding to position 447; and G at a position corresponding to position 447, with reference to amino acid residue positions of the sequence set forth in SEQ ID NO: 3.

10. The modified PH20 polypeptide of claim 1, wherein the amino acid replacement(s) is/are selected from among replacement with: glutamic acid (E) at a position corresponding to position 27; A at a position corresponding to position 132; K at a position corresponding to position 143; M at a position corresponding to position 147; C at a position corresponding to position 148; H at a position corresponding to position 148; Y at a position corresponding to position 160; P at a position corresponding to position 204; A at a position corresponding to position 205; I at a position corresponding to position 206; T at a position corresponding to position 215; M at a position corresponding to position 260; A at a position corresponding to position 261; F at a position corresponding to position 261; T at a position corresponding to position 263; A at a position corresponding to position 284; T at a position corresponding to position 315; and S at a position corresponding to position 379, with reference to amino acid residue positions of the sequence set forth in SEQ ID NO: 3.

11. The modified PH20 polypeptide of claim 1, wherein the amino acid replacement(s) is/are selected from among replacement with: P at a position corresponding to position 30; R at a position corresponding to position 58; K at a position corresponding to position 60; K at a position corresponding to position 143; I at a position corresponding to position 147; P at a position corresponding to position 204; T at a position corresponding to position 215; T at a position corresponding to position 235; A at a position corresponding to position 261; G at a position corresponding to position 311; T at a position corresponding to position 315; and H at a position corresponding to position 369, with reference to amino acid residue positions of the sequence set forth in SEQ ID NO: 3.

12. The modified PH20 polypeptide of claim 11, wherein the amino acid replacement(s) is/are selected from among replacement with: P at a position corresponding to position 30; K at a position corresponding to position 60; I at a position corresponding to position 147; T at a position corresponding to position 215; T at a position corresponding to position 235; G at a position corresponding to position 311; T at a position corresponding to position 315; and H at a position corresponding to position 369, with reference to amino acid residue positions of the sequence set forth in SEQ ID NO: 3.

13. The modified PH20 polypeptide of claim 1, wherein the amino acid replacement(s) is/are in an unmodified PH20 polypeptide that has the sequence of amino acids set forth in any of SEQ ID NOS: 3, 7, 10, 12, 14, 32-66, 69, 72, 388, 390, 392, or 400.

14. The modified PH20 polypeptide of claim 1, wherein the amino acid replacement(s) is/are in an unmodified PH20 polypeptide that has the sequence of amino acids set forth in SEQ ID NOS: 3, 7, 32-66, 69 or 72, or a sequence of amino acids that exhibits at least 91% sequence identity to any of SEQ ID NOS: 3, 7, 32-66, 69 or 72.

15. The modified PH20 polypeptide of claim 1, wherein the modified PH20 polypeptide exhibits at least 95%-amino acid sequence identity to the sequence of amino acids set forth in SEQ ID NO:3.

16. The modified PH20 polypeptide of claim 1 that is a mature PH20 polypeptide lacking the signal sequence.

17. The modified PH20 polypeptide of claim 1, consisting of the sequence of amino acids set forth in any of SEQ ID NOS: 73-386 or a sequence of amino acids that exhibits at least 95% or more sequence identity to a sequence of amino acids set forth in any of SEQ ID NOS: 73-386 and containing the amino acid replacement(s).

18. The modified PH20 polypeptide of claim 1 that is substantially purified or isolated.

19. The modified PH20 polypeptide of claim 1 that comprises one or more of glycosylation, sialation, albumination, farnysylation, carboxylation, hydroxylation and/or phosphorylation.

20. The modified PH20 polypeptide of claim 19, wherein the modified PH20 polypeptide is glycosylated.

21. The modified PH20 polypeptide of claim 1 that is conjugated to a polymer.

22. The modified PH20 polypeptide of claim 21, wherein the polymer is dextran or PEG.

23. The modified PH20 polypeptide of claim 1, wherein the modified PH20 polypeptide is conjugated to a moiety selected from among a multimerization domain, a toxin, a detectable label and a drug.

24. The modified PH20 polypeptide of claim 23, wherein the modified PH20 polypeptide is conjugated to an Fc domain.

25. A conjugate comprising the modified PH20 polypeptide of claim 1 linked directly or indirectly via a linker to a targeting agent.

26. A nucleic acid molecule, encoding a modified PH20 polypeptide of claim 1.

27. A vector, comprising the nucleic acid molecule of claim 26.

28. A cell, comprising the vector of claim 27.

29. A method of producing a modified PH20 polypeptide, comprising:
introducing the nucleic acid of claim 26 into a cell capable of incorporating N-linked sugar moieties into the polypeptide; and
culturing the cell under conditions whereby an encoded modified PH20 polypeptide is produced and secreted by the cell; and
optionally recovering the expressed PH20 polypeptide.

30. A pharmaceutical composition, comprising a modified PH20 polypeptide of claim 1 in a pharmaceutically acceptable excipient.

31. The pharmaceutical composition of claim 30, comprising a further therapeutically active agent.

32. The pharmaceutical composition of claim 31, wherein the therapeutically active agent is selected from among a protein, a nucleic acid, a drug, a small molecule or an organic molecule.

33. A combination comprising:
a first composition comprising a pharmaceutical composition of claim 30; and
a second composition, comprising a therapeutically active agent.

34. The combination of claim 33, wherein the therapeutic agent is a protein, a nucleic acid, a drug, a small molecule or an organic molecule.

35. A system for the non-refrigerated storage of a stable PH20 hyaluronidase formulation, comprising:
a) the modified PH20 polypeptide of claim 1; and
b) a container suitable for storage without refrigeration.

36. The system of claim 35, wherein the container is selected from among a vial, syringe, tube or bag.

37. A method of preparing a pharmaceutical composition comprising a PH20 hyaluronidase that can be stored for direct administration without refrigeration, comprising
a) providing a PH20 polypeptide of claim 1; and
b) formulating the polypeptide as a liquid with a pharmaceutically acceptable buffering agent for parenteral administration.

38. The method of claim 37, wherein parenteral administration is intravenous or subcutaneous administration.

39. A method for treating a hyaluronan-associated disease or condition or for increasing delivery of a therapeutic agent to a subject, comprising administering to a subject a pharmaceutical composition of claim 30.

40. The method of claim 39, wherein the method is for treating a hyaluronan-associated disease or condition and the hyaluronan-associated disease or condition is an inflammatory disease or a tumor or cancer.

41. The method of claim 40, wherein the tumor is a solid tumor.

42. The method of claim 39, wherein the administration is subcutaneous.

43. The method of claim 39, wherein the administration is intravenous.

44. A method for identifying or selecting a modified hyaluronan-degrading enzyme that exhibits thermal stability, comprising:
a) testing the activity of a modified hyaluronan-degrading enzyme or a member of a collection of modified hyaluronan-degrading enzymes after incubation at a temperature for a predetermined time that provides a thermal stress condition to the unmodified hyaluronan-degrading enzyme not containing a modification;
b) testing the activity of the modified hyaluronan-degrading enzyme or a member of a collection of modified hyaluronan-degrading enzymes after incubation at 2° C. to 8° C., wherein in the activity is tested under the same conditions as a) except for the difference in temperature; and
c) selecting or identifying a modified hyaluronan-degrading enzyme that exhibits activity in a) that is at least 50% of the activity in b).

45. The method of claim 44, further comprising:
d) comparing the activity in b) of the selected or identified modified hyaluronan-degrading enzyme to the activity of the unmodified hyaluronan-degrading enzyme tested under the same conditions; and
e) identifying or selecting a modified hyaluronan-degrading enzyme that exhibits at least 40% of the activity compared to the unmodified hyaluronan-degrading enzyme.

46. The method of claim 44, wherein the activity is hyaluronidase activity.

47. The method of claim 44, wherein:
the thermal stress condition is a temperature that is or is greater than the T₅₀ of the unmodified hyaluronan-degrading enzyme not containing a modification as determined in a thermal challenge assay for the predetermined time; or
the thermal stress condition is a temperature that is or is greater than the melting temperature (Tm) of the unmodified hyaluronan-degrading enzyme not containing a modification or modifications.

48. The method of claim 44, wherein activity in a) is tested at a temperature that is greater than 44° C.

49. The method of claim 44, wherein the unmodified hyaluronan degrading enzyme is a hyaluronidase and the hyaluronidase is a PH20 hyaluronidase or truncated form thereof lacking a C-terminal glycosylphosphatidylinositol (GPI) anchor attachment site or a portion of the GPI anchor attachment site, whereby the truncated form exhibits hyaluronidase activity.

50. The method of claim 49, wherein the unmodified hyaluronidase is a PH20 selected from a human, monkey, bovine, ovine, rat, fox, mouse or guinea pig PH20.

51. The method of claim 49, wherein the unmodified hyaluronidase is a human PH20 or a C-terminal truncated form thereof.

The application's sequence listing, which the Patent Office published only in electronic form, follows.

SEQUENCE LISTING (454 sequences)

SEQ ID NO: 1 - DNA, 1413 bp, Homo Sapiens
  Human PH20 hyaluronidase encoding PH20 36-482 containing IgG kappa signal sequence
atggacatgagggtaccagcccagctgttgggccttcttctgctttggctccctggggcaaggggacttaacttcagagctccccctgtaatcccaaacgtccccttcctgtgggcatggaacgcccctagcgaattctgtttggggaaatttgacgaacctctggacatgtctctgttttcttttatcggtagccctcgaatcaacgctaccggacagggggtgacaatcttttacgtggatcgtctgggctattacccttacatcgacagcattactggggtgaccgtgaacggaggcattcctcagaaaatatcactgcaggaccacctggacaaagctaagaaggatattacattctacatgccagtggacaatctcggaatggctgtgattgactgggaggagtggagacctacttgggcccgaaattggaagcccaaggatgtgtataagaaccgatccattgagctggtgcagcagcagaacgtgcagctgtcccttacagaagccaccgaaaaagctaagcaggaattcgagaaagctgggaaggatttcctggttgagacaataaaacttgggaaactgcttagacctaaccacctctggggctattatttgttccccgattgctacaatcaccactataagaagcccggctacaacggatcttgtttcaacgtcgaaattaaaagaaacgatgacctctcttggttgtggaatgagtctactgcactctacccctctatatatctcaacacacagcagtccccagtagccgctaccctctacgttcggaatagagtgagggaagccatcagggtgtccaagatccccgatgccaaatctcccctcccagtgtttgcctacaccaggatcgtgtttaccgaccaggtgttgaagttcctgagccaggacgagctcgtgtatacttttggcgagacagttgctctgggagcctctgggatcgtgatctggggcactctgagtattatgcgatcaatgaagtcctgcctgctgttggataactacatggagacaatcctgaacccatatatcattaacgtgactttggccgctaagatgtgttcacaggtgctgtgtcaagagcagggagtatgcattaggaagaactggaactcaagcgattatctccatctgaacccagataattttgcaatccagctggaaaagggtggtaaattcactgtccgagggaagcccacactcgaggatctcgaacagtttagtgaaaagttctactgtagctgctatagcactctgagttgtaaggaaaaagccgatgtgaaagacactgatgccgttgacgtttgcatcgccgatggggtgtgtattgacgcctttctcaagccaccaatggagactgaggagccccagatcttttactgataa

SEQ ID NO: 2 - protein, 469 aa, Homo Sapiens
  Human PH20 hyaluronidase 36-482 containing IgG kappa signal sequence
MDMRVPAQLLGLLLLWLPGARGLNFRAPPVIPNVPFLWAWNAPSEFCLGKFDEPLDMSLFSFIGSPRINATGQGVTIFYVDRLGYYPYIDSITGVTVNGGIPQKISLQDHLDKAKKDITFYMPVDNLGMAVIDWEEWRPTWARNWKPKDVYKNRSIELVQQQNVQLSLTEATEKAKQEFEKAGKDFLVETIKLGKLLRPNHLWGYYLFPDCYNHHYKKPGYNGSCFNVEIKRNDDLSWLWNESTALYPSIYLNTQQSPVAATLYVRNRVREAIRVSKIPDAKSPLPVFAYTRIVFTDQVLKFLSQDELVYTFGETVALGASGIVIWGTLSIMRSMKSCLLLDNYMETILNPYIINVTLAAKMCSQVLCQEQGVCIRKNWNSSDYLHLNPDNFAIQLEKGGKFTVRGKPTLEDLEQFSEKFYCSCYSTLSCKEKADVKDTDAVDVCIADGVCIDAFLKPPMETEEPQIFY

SEQ ID NO: 3 - protein, 447 aa, Homo Sapiens [sequence omitted]

SEQ ID NO: 4 - DNA, 7470 bp, Artificial Sequence
  HZ24-PH20-IRES-SEAP
tcaatattggccattagccatattattcattggttatatagcataaatcaatattggctattggccattgcatacgttgtatctatatcataatatgtacatttatattggctcatgtccaatatgaccgccatgttggcattgattattgactagttattaatagtaatcaattacggggtcattagttcatagcccatatatggagttccgcgttacataacttacggtaaatggcccgcctggctgaccgcccaacgacccccgcccattgacgtcaataatgacgtatgttcccatagtaacgccaatagggactttccattgacgtcaatgggtggagtatttacggtaaactgcccacttggcagtacatcaagtgtatcatatgccaagtccgccccctattgacgtcaatgacggtaaatggcccgcctggcattatgcccagtacatgaccttacgggactttcctacttggcagtacatctacgtattagtcatcgctattaccatggtgatgcggttttggcagtacaccaatgggcgtggatagcggtttgactcacggggatttccaagtctccaccccattgacgtcaatgggagtttgttttggcaccaaaatcaacgggactttccaaaatgtcgtaataaccccgccccgttgacgcaaatgggcggtaggcgtgtacggtgggaggtctatataagcagagctcgtttagtgaaccgtcagatcactagaagctttattgcggtagtttatcacagttaaattgctaacgcagtcagtgcttctgacacaacagtctcgaacttaagctgcagaagttggtcgtgaggcactgggcaggtaagtatcaaggttacaagacaggtttaaggagaccaatagaaactgggcttgtcgagacagagaagactcttgcgtttctgataggcacctattggtcttactgacatccactttgcctttctctccacaggtgtccactcccagttcaattacagctcttaaggctagagtacttaatacgactcactataggctagcatggacatgagggtaccagcccagctgttgggccttcttctgctttggctccctggggcaaggggacttaacttcagagctccccctgtaatcccaaacgtccccttcctgtgggcatggaacgcccctagcgaattctgtttggggaaatttgacgaacctctggacatgtctctgttttcttttatcggtagccctcgaatcaacgctaccggacagggggtgacaatcttttacgtggatcgtctgggctattacccttacatcgacagcattactggggtgaccgtgaacggaggcattcctcagaaaatatcactgcaggaccacctggacaaagctaagaaggatattacattctacatgccagtggacaatctcggaatggctgtgattgactgggaggagtggagacctacttgggcccgaaattggaagcccaaggatgtgtataagaaccgatccattgagctggtgcagcagcagaacgtgcagctgtcccttacagaagccaccgaaaaagctaagcaggaattcgagaaagctgggaaggatttcctggttgagacaataaaacttgggaaactgcttagacctaaccacctctggggctattatttgttccccgattgctacaatcaccactataagaagcccggctacaacggatcttgtttcaacgtcgaaattaaaagaaacgatgacctctcttggttgtggaatgagtctactgcactctacccctctatatatctcaacacacagcagtccccagtagccgctaccctctacgttcggaatagagtgagggaagccatcagggtgtccaagatccccgatgccaaatctcccctcccagtgtttgcctacaccaggatcgtgtttaccgaccaggtgttgaagttcctgagccaggacgagctcgtgtatacttttggcgagacagttgctctgggagcctctgggatcgtgatctggggcactctgagtattatgcgatcaatgaagtcctgcctgctgttggataactacatggagacaatcctgaacccatatatcattaacgtgactttggccgctaagatgtgttcacaggtgctgtgtcaagagcagggagtatgcattaggaagaactggaactcaagcgattatctccatctgaacccagataattttgcaatccagctggaaaagggtggtaaattcactgtccgagggaagcccacactcgaggatctcgaacagtttagtgaaaagttctactgtagctgctatagcactctgagttgtaaggaaaaagccgatgtgaaagacactgatgccgttgacgtttgcatcgccgatggggtgtgtattgacgcctttctcaagccaccaatggagactgaggagccccagatcttttactgataaggatccatagctaacgcccctctccctcccccccccctaacgttactggccgaagccgcttggaataaggccggtgtgcgtttgtctatatgttattttccaccatattgccgtcttttggcaatgtgagggcccggaaacctggccctgtcttcttgacgagcattcctaggggtctttcccctctcgccaaaggaatgcaaggtctgttgaatgtcgtgaaggaagcagttcctctggaagcttcttgaagacaaacaacgtctgtagcgaccctttgcaggcagcggaaccccccacctggcgacaggtgcctctgcggccaaaagccacgtgtataagatacacctgcaaaggcggcacaaccccagtgccacgttgtgagttggatagttgtggaaagagtcaaatggctctcctcaagcgtattcaacaaggggctgaaggatgcccagaaggtaccccattgtatgggatctgatctggggcctcggtgcacatgggtcttttctgcagtcaccgtcgtcgacaagcttcctgcatgctgctgctgctgctgctgctgggcctgaggctacagctctccctgggcatcatcccagttgaggaggagaacccggacttctggaaccgcgaggcagccgaggccctgggtgccgccaagaagctgcagcctgcacagacagccgccaagaacctcatcatcttcctgggcgatgggatgggggtgtctacggtgacagctgccaggatcctaaaagggcagaagaaggacaaactggggcctgagatacccctggccatggaccgcttcccatatgtggctctgtccaagacatacaatgtagacaaacatgtgccagacagtggagccacagccacggcctacctgtgcggggtcaagggcaacttccagaccattggcttgagtgcagccgcccgctttaaccagtgcaacacgacacgcggcaacgaggtcatctccgtgatgaatcgggccaagaaagcagggaagtcagtgggagtggtaaccaccacacgagtgcagcacgcctcgccagccggcacctacgcccacacggtgaaccgcaactggtactcggacgccgacgtgcctgcctcggcccgccaggaggggtgccaggacatcgctacgcagctcatctccaacatggacattgacgtgatcctaggtggaggccgaaagtacatgtttcgcatgggaaccccagaccctgagtacccagatgactacagccaaggtgggaccaggctggacgggaagaatctggtgcaggaatggctggcgaagcgccagggtgcccggtatgtgtggaaccgcactgagctcatgcaggcttccctggacccgtctgtgacccatctcatgggtctctttgagcctggagacatgaaatacgagatccaccgagactccacactggacccctccctgatggagatgacagaggctgccctgcgcctgctgagcaggaacccccgcggcttcttcctcttcgtggagggtggtcgcatcgaccatggtcatcatgaaagcagggcttaccgggcactgactgagacgatcatgttcgacgacgccattgagagggcgggccagctcaccagcgaggaggacacgctgagcctcgtcactgccgaccactcccacgtcttctccttcggaggctaccccctgcgagggagctccatcttcgggctggcccctggcaaggcccgggacaggaaggcctacacggtcctcctatacggaaacggtccaggctatgtgctcaaggacggcgcccggccggatgttaccgagagcgagagcgggagccccgagtatcggcagcagtcagcagtgcccctggacgaagagacccacgcaggcgaggacgtggcggtgttcgcgcgcggcccgcaggcgcacctggttcacggcgtgcaggagcagaccttcatagcgcacgtcatggccttcgccgcctgcctggagccctacaccgcctgcgacctggcgccccccgccggcaccaccgacgccgcgcacccgggttaaacgcgtggtacctctagagtcgacccgggcggccgcttcgagcagacatgataagatacattgatgagtttggacaaaccacaactagaatgcagtgaaaaaaatgctttatttgtgaaatttgtgatgctattgctttatttgtaaccattataagctgcaataaacaagttaacaacaacaattgcattcattttatgtttcaggttcagggggagatgtgggaggttttttaaagcaagtaaaacctctacaaatgtggtaaaatcgataaggatccgggctggcgtaatagcgaagaggcccgcaccgatcgcccttcccaacagttgcgcagcctgaatggcgaatggacgcgccctgtagcggcgcattaagcgcggcgggtgtggtggttacgcgcagcgtgaccgctacacttgccagcgccctagcgcccgctcctttcgctttcttcccttcctttctcgccacgttcgccggctttccccgtcaagctctaaatcgggggctccctttagggttccgatttagtgctttacggcacctcgaccccaaaaaacttgattagggtgatggttcacgtagtgggccatcgccctgatagacggtttttcgccctttgacgttggagtccacgttctttaatagtggactcttgttccaaactggaacaacactcaaccctatctcggtctattcttttgatttataagggattttgccgatttcggcctattggttaaaaaatgagctgatttaacaaaaatttaacgcgaattttaacaaaatattaacgcttacaatttcctgatgcggtattttctccttacgcatctgtgcggtatttcacaccgcatatggtgcactctcagtacaatctgctctgatgccgcatagttaagccagccccgacacccgccaacacccgctgacgcgccctgacgggcttgtctgctcccggcatccgcttacagacaagctgtgaccgtctccgggagctgcatgtgtcagaggttttcaccgtcatcaccgaaacgcgcgagacgaaagggcctcgtgatacgcctatttttataggttaatgtcatgataataatggtttcttagacgtcaggtggcacttttcggggaaatgtgcgcggaacccctatttgtttatttttctaaatacattcaaatatgtatccgctcatgagacaataaccctgataaatgcttcaataatattgaaaaaggaagagtatgagtattcaacatttccgtgtcgcccttattcccttttttgcggcattttgccttcctgtttttgctcacccagaaacgctggtgaaagtaaaagatgctgaagatcagttgggtgcacgagtgggttacatcgaactggatctcaacagcggtaagatccttgagagttttcgccccgaagaacgttttccaatgatgagcacttttaaagttctgctatgtggcgcggtattatcccgtattgacgccgggcaagagcaactcggtcgccgcatacactattctcagaatgacttggttgagtactcaccagtcacagaaaagcatcttacggatggcatgacagtaagagaattatgcagtgctgccataaccatgagtgataacactgcggccaacttacttctgacaacgatcggaggaccgaaggagctaaccgcttttttgcacaacatgggggatcatgtaactcgccttgatcgttgggaaccggagctgaatgaagccataccaaacgacgagcgtgacaccacgatgcctgtagcaatggcaacaacgttgcgcaaactattaactggcgaactacttactctagcttcccggcaacaattaatagactggatggaggcggataaagttgcaggaccacttctgcgctcggcccttccggctggctggtttattgctgataaatctggagccggtgagcgtgggtctcgcggtatcattgcagcactggggccagatggtaagccctcccgtatcgtagttatctacacgacggggagtcaggcaactatggatgaacgaaatagacagatcgctgagataggtgcctcactgattaagcattggtaactgtcagaccaagtttactcatatatactttagattgatttaaaacttcatttttaatttaaaaggatctaggtgaagatcctttttgataatctcatgaccaaaatcccttaacgtgagttttcgttccactgagcgtcagaccccgtagaaaagatcaaaggatcttcttgagatcctttttttctgcgcgtaatctgctgcttgcaaacaaaaaaaccaccgctaccagcggtggtttgtttgccggatcaagagctaccaactctttttccgaaggtaactggcttcagcagagcgcagataccaaatactgttcttctagtgtagccgtagttaggccaccacttcaagaactctgtagcaccgcctacatacctcgctctgctaatcctgttaccagtggctgctgccagtggcgataagtcgtgtcttaccgggttggactcaagacgatagttaccggataaggcgcagcggtcgggctgaacggggggttcgtgcacacagcccagcttggagcgaacgacctacaccgaactgagatacctacagcgtgagctatgagaaagcgccacgcttcccgaagggagaaaggcggacaggtatccggtaagcggcagggtcggaacaggagagcgcacgagggagcttccagggggaaacgcctggtatctttatagtcctgtcgggtttcgccacctctgacttgagcgtcgatttttgtgatgctcgtcaggggggcggagcctatggaaaaacgccagcaacgcggcctttttacggttcctggccttttgctggccttttgctcacatggctcgacagatct

SEQ ID NO: 5 - DNA, 6630 bp, Artificial Sequence
  HZ24-DHFR expression vector
tcaatattggccattagccatattattcattggttatatagcataaatcaatattggctattggccattgcatacgttgtatctatatcataatatgtacatttatattggctcatgtccaatatgaccgccatgttggcattgattattgactagttattaatagtaatcaattacggggtcattagttcatagcccatatatggagttccgcgttacataacttacggtaaatggcccgcctggctgaccgcccaacgacccccgcccattgacgtcaataatgacgtatgttcccatagtaacgccaatagggactttccattgacgtcaatgggtggagtatttacggtaaactgcccacttggcagtacatcaagtgtatcatatgccaagtccgccccctattgacgtcaatgacggtaaatggcccgcctggcattatgcccagtacatgaccttacgggactttcctacttggcagtacatctacgtattagtcatcgctattaccatggtgatgcggttttggcagtacaccaatgggcgtggatagcggtttgactcacggggatttccaagtctccaccccattgacgtcaatgggagtttgttttggcaccaaaatcaacgggactttccaaaatgtcgtaataaccccgccccgttgacgcaaatgggcggtaggcgtgtacggtgggaggtctatataagcagagctcgtttagtgaaccgtcagatcactagaagctttattgcggtagtttatcacagttaaattgctaacgcagtcagtgcttctgacacaacagtctcgaacttaagctgcagaagttggtcgtgaggcactgggcaggtaagtatcaaggttacaagacaggtttaaggagaccaatagaaactgggcttgtcgagacagagaagactcttgcgtttctgataggcacctattggtcttactgacatccactttgcctttctctccacaggtgtccactcccagttcaattacagctcttaaggctagagtacttaatacgactcactataggctagcatgggagtgctaaaattcaagcacatctttttcagaagctttgttaaatcaagtggagtatcccagatagttttcaccttccttctgattccatgttgcttgactctgaatttcagagcacctcctgttattccaaatgtgcctttcctctgggcctggaatgccccaagtgaattttgtcttggaaaatttgatgagccactagatatgagcctcttctctttcataggaagcccccgaataaacgccaccgggcaaggtgttacaatattttatgttgatagacttggctactatccttacatagattcaatcacaggagtaactgtgaatggaggaatcccccagaagatttccttacaagaccatctggacaaagctaagaaagacattacattttatatgccagtagacaatttgggaatggctgttattgactgggaagaatggagacccacttgggcaagaaactggaaacctaaagatgtttacaagaataggtctattgaattggttcagcaacaaaatgtacaacttagtctcacagaggccactgagaaagcaaaacaagaatttgaaaaggcagggaaggatttcctggtagagactataaaattgggaaaattacttcggccaaatcacttgtggggttattatctttttccggattgttacaaccatcactataagaaacccggttacaatggaagttgcttcaatgtagaaataaaaagaaatgatgatctcagctggttgtggaatgaaagcactgctctttacccatccatttatttgaacactcagcagtctcctgtagctgctacactctatgtgcgcaatcgagttcgggaagccatcagagtttccaaaatacctgatgcaaaaagtccacttccggtttttgcatatacccgcatagtttttactgatcaagttttgaaattcctttctcaagatgaacttgtgtatacatttggcgaaactgttgctctgggtgcttctggaattgtaatatggggaaccctcagtataatgcgaagtatgaaatcttgcttgctcctagacaattacatggagactatactgaatccttacataatcaacgtcacactagcagccaaaatgtgtagccaagtgctttgccaggagcaaggagtgtgtataaggaaaaactggaattcaagtgactatcttcacctcaacccagataattttgctattcaacttgagaaaggtggaaagttcacagtacgtggaaaaccgacacttgaagacctggagcaattttctgaaaaattttattgcagctgttatagcaccttgagttgtaaggagaaagctgatgtaaaagacactgatgctgttgatgtgtgtattgctgatggtgtctgtatagatgcttttctaaaacctcccatggagacagaagaacctcaaattttctactgaggatccatagctaacgcccctctccctcccccccccctaacgttactggccgaagccgcttggaataaggccggtgtgcgtttgtctatatgttattttccaccatattgccgtcttttggcaatgtgagggcccggaaacctggccctgtcttcttgacgagcattcctaggggtctttcccctctcgccaaaggaatgcaaggtctgttgaatgtcgtgaaggaagcagttcctctggaagcttcttgaagacaaacaacgtctgtagcgaccctttgcaggcagcggaaccccccacctggcgacaggtgcctctgcggccaaaagccacgtgtataagatacacctgcaaaggcggcacaaccccagtgccacgttgtgagttggatagttgtggaaagagtcaaatggctctcctcaagcgtattcaacaaggggctgaaggatgcccagaaggtaccccattgtatgggatctgatctggggcctcggtgcacatgctttacatgtgtttagtcgaggttaaaaaaacgtctaggccccccgaaccacggggacgtggttttcctttgaaaaacacgatgataagcttgccacaacccacagcggccgctgccatcatggttcgaccattgaactgcatcgtcgccgtgtcccaaaatatggggattggcaagaacggagacctaccctggcctccgctcaggaacgagttcaagtacttccaaagaatgaccacaacctcttcagtggaaggtaaacagaatctggtgattatgggtaggaaaacctggttctccattcctgagaagaatcgacctttaaaggacagaattaatatagttctcagtagagaactcaaagaaccaccacgaggagctcattttcttgccaaaagtttggatgatgccttaagacttattgaacaaccggaattggcaagtaaagtagacatggtttggatagtcggaggcagttctgtttaccaggaagccatgaatcaaccaggccacctcagactctttgtgacaaggatcatgcaggaatttgaaagtgacacgtttttcccagaaattgatttggggaaatataaacttctcccagaatacccaggcgtcctctctgaggtccaggaggaaaaaggcatcaagtataagtttgaagtctacgagaagaaagactaaacgcgtggtacctctagagtcgacccgggcggccgcttcgagcagacatgataagatacattgatgagtttggacaaaccacaactagaatgcagtgaaaaaaatgctttatttgtgaaatttgtgatgctattgctttatttgtaaccattataagctgcaataaacaagttaacaacaacaattgcattcattttatgtttcaggttcagggggagatgtgggaggttttttaaagcaagtaaaacctctacaaatgtggtaaaatcgataaggatccgggctggcgtaatagcgaagaggcccgcaccgatcgcccttcccaacagttgcgcagcctgaatggcgaatggacgcgccctgtagcggcgcattaagcgcggcgggtgtggtggttacgcgcagcgtgaccgctacacttgccagcgccctagcgcccgctcctttcgctttcttcccttcctttctcgccacgttcgccggctttccccgtcaagctctaaatcgggggctccctttagggttccgatttagtgctttacggcacctcgaccccaaaaaacttgattagggtgatggttcacgtagtgggccatcgccctgatagacggtttttcgccctttgacgttggagtccacgttctttaatagtggactcttgttccaaactggaacaacactcaaccctatctcggtctattcttttgatttataagggattttgccgatttcggcctattggttaaaaaatgagctgatttaacaaaaatttaacgcgaattttaacaaaatattaacgcttacaatttcctgatgcggtattttctccttacgcatctgtgcggtatttcacaccgcatatggtgcactctcagtacaatctgctctgatgccgcatagttaagccagccccgacacccgccaacacccgctgacgcgccctgacgggcttgtctgctcccggcatccgcttacagacaagctgtgaccgtctccgggagctgcatgtgtcagaggttttcaccgtcatcaccgaaacgcgcgagacgaaagggcctcgtgatacgcctatttttataggttaatgtcatgataataatggtttcttagacgtcaggtggcacttttcggggaaatgtgcgcggaacccctatttgtttatttttctaaatacattcaaatatgtatccgctcatgagacaataaccctgataaatgcttcaataatattgaaaaaggaagagtatgagtattcaacatttccgtgtcgcccttattcccttttttgcggcattttgccttcctgtttttgctcacccagaaacgctggtgaaagtaaaagatgctgaagatcagttgggtgcacgagtgggttacatcgaactggatctcaacagcggtaagatccttgagagttttcgccccgaagaacgttttccaatgatgagcacttttaaagttctgctatgtggcgcggtattatcccgtattgacgccgggcaagagcaactcggtcgccgcatacactattctcagaatgacttggttgagtactcaccagtcacagaaaagcatcttacggatggcatgacagtaagagaattatgcagtgctgccataaccatgagtgataacactgcggccaacttacttctgacaacgatcggaggaccgaaggagctaaccgcttttttgcacaacatgggggatcatgtaactcgccttgatcgttgggaaccggagctgaatgaagccataccaaacgacgagcgtgacaccacgatgcctgtagcaatggcaacaacgttgcgcaaactattaactggcgaactacttactctagcttcccggcaacaattaatagactggatggaggcggataaagttgcaggaccacttctgcgctcggcccttccggctggctggtttattgctgataaatctggagccggtgagcgtgggtctcgcggtatcattgcagcactggggccagatggtaagccctcccgtatcgtagttatctacacgacggggagtcaggcaactatggatgaacgaaatagacagatcgctgagataggtgcctcactgattaagcattggtaactgtcagaccaagtttactcatatatactttagattgatttaaaacttcatttttaatttaaaaggatctaggtgaagatcctttttgataatctcatgaccaaaatcccttaacgtgagttttcgttccactgagcgtcagaccccgtagaaaagatcaaaggatcttcttgagatcctttttttctgcgcgtaatctgctgcttgcaaacaaaaaaaccaccgctaccagcggtggtttgtttgccggatcaagagctaccaactctttttccgaaggtaactggcttcagcagagcgcagataccaaatactgttcttctagtgtagccgtagttaggccaccacttcaagaactctgtagcaccgcctacatacctcgctctgctaatcctgttaccagtggctgctgccagtggcgataagtcgtgtcttaccgggttggactcaagacgatagttaccggataaggcgcagcggtcgggctgaacggggggttcgtgcacacagcccagcttggagcgaacgacctacaccgaactgagatacctacagcgtgagctatgagaaagcgccacgcttcccgaagggagaaaggcggacaggtatccggtaagcggcagggtcggaacaggagagcgcacgagggagcttccagggggaaacgcctggtatctttatagtcctgtcgggtttcgccacctctgacttgagcgtcgatttttgtgatgctcgtcaggggggcggagcctatggaaaaacgccagcaacgcggcctttttacggttcctggccttttgctggccttttgctcacatggctcgacagatct

SEQ ID NO: 6 - protein, 509 aa, Homo Sapiens
  Precursor Full-length human PH20
MGVLKFKHIFFRSFVKSSGVSQIVFTFLLIPCCLTLNFRAPPVIPNVPFLWAWNAPSEFCLGKFDEPLDMSLFSFIGSPRINATGQGVTIFYVDRLGYYPYIDSITGVTVNGGIPQKISLQDHLDKAKKDITFYMPVDNLGMAVIDWEEWRPTWARNWKPKDVYKNRSIELVQQQNVQLSLTEATEKAKQEFEKAGKDFLVETIKLGKLLRPNHLWGYYLFPDCYNHHYKKPGYNGSCFNVEIKRNDDLSWLWNESTALYPSIYLNTQQSPVAATLYVRNRVREAIRVSKIPDAKSPLPVFAYTRIVFTDQVLKFLSQDELVYTFGETVALGASGIVIWGTLSIMRSMKSCLLLDNYMETILNPYIINVTLAAKMCSQVLCQEQGVCIRKNWNSSDYLHLNPDNFAIQLEKGGKFTVRGKPTLEDLEQFSEKFYCSCYSTLSCKEKADVKDTDAVDVCIADGVCIDAFLKPPMETEEPQIFYNASPSTLSATMFIVSILFLIISSVASL

SEQ ID NO: 7 - protein, 474 aa, Homo Sapiens
  Mature full-length human PH20
LNFRAPPVIPNVPFLWAWNAPSEFCLGKFDEPLDMSLFSFIGSPRINATGQGVTIFYVDRLGYYPYIDSITGVTVNGGIPQKISLQDHLDKAKKDITFYMPVDNLGMAVIDWEEWRPTWARNWKPKDVYKNRSIELVQQQNVQLSLTEATEKAKQEFEKAGKDFLVETIKLGKLLRPNHLWGYYLFPDCYNHHYKKPGYNGSCFNVEIKRNDDLSWLWNESTALYPSIYLNTQQSPVAATLYVRNRVREAIRVSKIPDAKSPLPVFAYTRIVFTDQVLKFLSQDELVYTFGETVALGASGIVIWGTLSIMRSMKSCLLLDNYMETILNPYIINVTLAAKMCSQVLCQEQGVCIRKNWNSSDYLHLNPDNFAIQLEKGGKFTVRGKPTLEDLEQFSEKFYCSCYSTLSCKEKADVKDTDAVDVCIADGVCIDAFLKPPMETEEPQIFYNASPSTLSATMFIVSILFLIISSVASL

SEQ ID NO: 8 - protein, 510 aa, Pan troglodyte
  Precursor chimpanzee PH20
MGVLKFKHIFFRSFVKSSGVSQIVFTFLLIPCCLTLNFRAPPVIPNVPFLWAWNAPSEFCLGKFDEPLDMSLFSFIGSPRINVTGQDVTIFYVDRLGYYPYIDSITGVTVNGGIPQKISLQDHLDKAKKDITFYMPVDNLGMAVIDWEEWRPTWARNWKPKDVYKNRSIELVQQQNVQLSLTEATEKAKQEFEKAGKDFLVETIKLGKLLRPNHLWGYYLFPDCYNHHYKKPGYNGSCFNVEIKRNDDLSWLWNESTALYPSIYLNTQQSPVAATLYVRNRVQEAIRVSKIPDAKSPLPVFVYTRIVFTDQVLKFLSQDELVYTFGETVALGASGIVIWGTLSIMRSMKSCLLLDNYMETILNPYIINVTLAAKMCSQVLCQEQGVCIRKNWNSSDYLHLNPDNFAIQLEKGGKFTVRGKPTLEDLEQFSEKFYCSCYSTLSCKEKADVKDTDAVDVCIADGVCIDAFLKPPMETEESQIFYNASPSTLSATMFIDLCDLYLVPTSYLIL

SEQ ID NO: 9 - protein, 509 aa, Pan troglodyte
  Precursor chimpanzee PH20
  ref <308>: DATABASE ACCESSION NUMBER: NCBI: XP_527873
  ref <309>: DATABASE ENTRY DATE: 2011-05-13
MGVLKFKHIFFRSFVKSSGVSQIVFTFLLIPCCLTLNFRAPPVIPNVPFLWAWNAPSEFCLGKFDEPLDMSLFSFIGSPRINVTGQDVTIFYVDRLGYYPYIDSITGVTVNGGIPQKISLQDHLDKAKKDITFYMPVDNLGMAVIDWEEWRPTWARNWKPKDVYKNRSIELVQQQNVQLSLTEATEKAKQEFEKAGKDFLVETIKLGKLLRPNHLWGYYLFPDCYNHHYKKPGYNGSCFNVEIKRNDDLSWLWNESTALYPSIYLNTQQSPVAATLYVRNRVQEAIRVSKIPDAKSPLPVFVYTRIVFTDQVLKFLSQDELVYTFGETVALGASGIVIWGTLSIMRSMKSCLLLDNYMETILNPYIINVTLAAKMCSQVLCQEQGVCIRKNWNSSDYLHLNPDNFAIQLEKGGKFTVRGKPTLEDLEQFSEKFYCSCYSTLSCKEKADVKDTDAVDVCIADGVCIDAFLKPPMETEESQIFYNASPSTLSATMFIVSILFLIISSVASL

SEQ ID NO: 10 - protein, 474 aa, Pan troglodyte
  mature chimpanzee PH20
LNFRAPPVIPNVPFLWAWNAPSEFCLGKFDEPLDMSLFSFIGSPRINVTGQDVTIFYVDRLGYYPYIDSITGVTVNGGIPQKISLQDHLDKAKKDITFYMPVDNLGMAVIDWEEWRPTWARNWKPKDVYKNRSIELVQQQNVQLSLTEATEKAKQEFEKAGKDFLVETIKLGKLLRPNHLWGYYLFPDCYNHHYKKPGYNGSCFNVEIKRNDDLSWLWNESTALYPSIYLNTQQSPVAATLYVRNRVQEAIRVSKIPDAKSPLPVFVYTRIVFTDQVLKFLSQDELVYTFGETVALGASGIVIWGTLSIMRSMKSCLLLDNYMETILNPYIINVTLAAKMCSQVLCQEQGVCIRKNWNSSDYLHLNPDNFAIQLEKGGKFTVRGKPTLEDLEQFSEKFYCSCYSTLSCKEKADVKDTDAVDVCIADGVCIDAFLKPPMETEESQIFYNASPSTLSATMFIVSILFLIISSVASL

SEQ ID NO: 11 - protein, 512 aa, Macaca mulatta
  Precursor Rhesus Monkey PH20
  ref <308>: DATABASE ACCESSION NUMBER: GenBank: EHH17639
  ref <309>: DATABASE ENTRY DATE: 2011-11-04
MGVLKFKHIFFRSFVKSSGVSQIVFTFLLIPCCLTLNFRAPPIIPNVPFLWAWNAPSEFCLGKFNEPLDMSLFTLMGSPRINITGQGVTIFYVDRLGYYPYIDLTTGVTVHGGIPQKVSLQDHLDKSKQDILFYMPVDNLGMAVIDWEEWRPTWARNWKPKDVYKNRSIELVQQQNVQLSLPQATDKAKQEFEKAGKDFMLETIKLGRSLRPNHLWGYYLFPDCYNHHYRKPGYNGSCFDVEIKRNDDLSWLWNESTALYPSIYLNTQQSVVVATLYVRNRVREAIRVSKIPDAKNPLPVFVYARLVFTDQVLKFLSREELVSTLGETVALGASGIVIWGSLSITRSMKSCLLLDTYMETILNPYIINVTLAAKMCSQVLCQEQGVCIRKDWNSSDYLHLNPDNFDIRLEKGGKFTVHGKPTVEDLEEFSEKFYCSCYTNLSCKEKADVKDTDAVDVCIADGVCIDASLKPPVETEGSPPIFYNTSSSTVSTTMFIWRLEVWDQGISRIGFF

SEQ ID NO: 12 - protein, 477 aa, Macaca mulatta
  mature Rhesus monkey PH20
LNFRAPPIIPNVPFLWAWNAPSEFCLGKFNEPLDMSLFTLMGSPRINITGQGVTIFYVDRLGYYPYIDLTTGVTVHGGIPQKVSLQDHLDKSKQDILFYMPVDNLGMAVIDWEEWRPTWARNWKPKDVYKNRSIELVQQQNVQLSLPQATDKAKQEFEKAGKDFMLETIKLGRSLRPNHLWGYYLFPDCYNHHYRKPGYNGSCFDVEIKRNDDLSWLWNESTALYPSIYLNTQQSVVVATLYVRNRVREAIRVSKIPDAKNPLPVFVYARLVFTDQVLKFLSREELVSTLGETVALGASGIVIWGSLSITRSMKSCLLLDTYMETILNPYIINVTLAAKMCSQVLCQEQGVCIRKDWNSSDYLHLNPDNFDIRLEKGGKFTVHGKPTVEDLEEFSEKFYCSCYTNLSCKEKADVKDTDAVDVCIADGVCIDASLKPPVETEGSPPIFYNTSSSTVSTTMFIWRLEVWDQGISRIGFF

SEQ ID NO: 13 - protein, 510 aa, Macaca fascicularis
  Precursor Cynomolgus monkey PH20
  ref <308>: DATABASE ACCESSION NUMBER: UniProtKB: P38568.1
  ref <309>: DATABASE ENTRY DATE: 1994-10-01
MGVLKFKHIFFRSFVKSSGVSQIVFTFLLIPCCLTLNFRAPPIIPNVPFLWAWNAPSEFCLGKFNEPLDMSLFTLMGSPRINVTGQGVTIFYVDRLGYYPYIDLTTGVTVHGGIPQKVSLQDHLDKSKQDILFYMPVDNLGMAVIDWEEWRPTWARNWKPKDVYKNRSIELVQQQNVQLSLPQATDKAKQEFEKAGKDFMLETIKLGRSLRPNHLWGYYLFPDCYNHHYRKPGYNGSCFDVEIKRNDDLSWLWNESTALYPSIYLNTQQSVVVATLYVRNRVREAIRVSKIPDAKNPLPVFVYARLVFTDQVLKFLSREELVSTLGETVALGASGIVIWGSLSITRSMKSCLLLDTYMETILNPYIINVTLAAKMCSQVLCQEQGVCIRKDWNSSDYLHLNPDNFDIRLEKGGKFTVHGKPTVEDLEEFSEKFYCSCYTNLSCKEKADVKDTDAVDVCIADGVCIDASLKPPVETEGSPPIFYNTSSSTVSTTMFIVNILFLIISSVASL

SEQ ID NO: 14 - protein, 475 aa, Macaca fascicularis
  mature Cynomolgus monkey PH20
  ref <308>: DATABASE ACCESSION NUMBER: UniProtKB: P38568.1
  ref <309>: DATABASE ENTRY DATE: 1994-10-01
LNFRAPPIIPNVPFLWAWNAPSEFCLGKFNEPLDMSLFTLMGSPRINVTGQGVTIFYVDRLGYYPYIDLTTGVTVHGGIPQKVSLQDHLDKSKQDILFYMPVDNLGMAVIDWEEWRPTWARNWKPKDVYKNRSIELVQQQNVQLSLPQATDKAKQEFEKAGKDFMLETIKLGRSLRPNHLWGYYLFPDCYNHHYRKPGYNGSCFDVEIKRNDDLSWLWNESTALYPSIYLNTQQSVVVATLYVRNRVREAIRVSKIPDAKNPLPVFVYARLVFTDQVLKFLSREELVSTLGETVALGASGIVIWGSLSITRSMKSCLLLDTYMETILNPYIINVTLAAKMCSQVLCQEQGVCIRKDWNSSDYLHLNPDNFDIRLEKGGKFTVHGKPTVEDLEEFSEKFYCSCYTNLSCKEKADVKDTDAVDVCIADGVCIDASLKPPVETEGSPPIFYNTSSSTVSTTMFIVNILFLIISSVASL

SEQ ID NO: 15 - protein, 553 aa, Bos taurus
  Precursor cow PH20
  ref <308>: DATABASE ACCESSION NUMBER: GenBank: AAI10184.1
  ref <309>: DATABASE ENTRY DATE: 2009-03-18
MRMLRRHHISFRSFAGSSGTPQAVFTFLLLPCCLALDFRAPPLISNTSFLWAWNAPVERCVNRRFQLPPDLRLFSVKGSPQKSATGQFITLFYADRLGYYPHIDEKTGKTVFGGIPQLGNLKSHMEKAKNDIAYYIPNDSVGLAVIDWENWRPTWARNWKPKDVYRDESVELVLQKNPQLSFPEASKIAKVDFETAGKSFMQETLKLGKLLRPNHLWGYYLFPDCYNHNHNQPTYNGNCPDVEKRRNDDLEWLWKESTALFPSVYLNIRLKSTQNAALYVRNRVQEAIRLSKIASVESPLPVFVYARPVFTDGSSTYLSQGDLVNSVGEIVSLGASGIIMWGSLNLSLSMQSCMNLGTYLNTTLNPYIINVTLAAKMCSQVLCHNEGVCTRKHWNSSDYLHLNPMNFAIQTGEGGKYTVPGTVTLEDLQKFSDTFYCSCYANIHCKKRVDIKNVHSVNVCMAEDICIDSPVKLQPSDHSSSQEASTTTFSSISPSTTTATVSPCTPEKHSPECLKVRCSEVIPNVTQKACQSVKLKNISYQSPIQNIKNQTTY

SEQ ID NO: 16 - protein, 518 aa, Bos taurus
  Mature cow PH20
LDFRAPPLISNTSFLWAWNAPVERCVNRRFQLPPDLRLFSVKGSPQKSATGQFITLFYADRLGYYPHIDEKTGKTVFGGIPQLGNLKSHMEKAKNDIAYYIPNDSVGLAVIDWENWRPTWARNWKPKDVYRDESVELVLQKNPQLSFPEASKIAKVDFETAGKSFMQETLKLGKLLRPNHLWGYYLFPDCYNHNHNQPTYNGNCPDVEKRRNDDLEWLWKESTALFPSVYLNIRLKSTQNAALYVRNRVQEAIRLSKIASVESPLPVFVYARPVFTDGSSTYLSQGDLVNSVGEIVSLGASGIIMWGSLNLSLSMQSCMNLGTYLNTTLNPYIINVTLAAKMCSQVLCHNEGVCTRKHWNSSDYLHLNPMNFAIQTGEGGKYTVPGTVTLEDLQKFSDTFYCSCYANIHCKKRVDIKNVHSVNVCMAEDICIDSPVKLQPSDHSSSQEASTTTFSSISPSTTTATVSPCTPEKHSPECLKVRCSEVIPNVTQKACQSVKLKNISYQSPIQNIKNQTTY

SEQ ID NO: 17 - protein, 474 aa, Bos taurus
  Precursor cow PH20
  ref <308>: DATABASE ACCESSION NUMBER: GenBank: AAP55713
  ref <309>: DATABASE ENTRY DATE: 2003-06-11
MGMFRRHHISFRSFAGSSGTPQAVFTFLLLPCCLALDFRAPPLISNTSFLWAWNAPVERCVNRRFQLPPDLRLFSVKGSPQKSATGQFITLFYADRLGYYPHIDEKTGKTVFGGIPQLGNLKSHLEKAKNDIAYYIPNDSVGLAVIDWENWRPTWARNWKPKDVYRDESVELVLQKNPQLSFPEASKIAKVDFETAGKSFMQETLKLGKLLRPNHLWGYYLFPDCYNHNHNQPTYNGNCPDVEKRRNDDLEWLWKESTALFPSVYLNIRLKSTQNAALYVRNRVQEAIRLSKIASVESPLPVFVYARPVFTDGSSTYLSQGDLVNSVGEIVSLGASGIIMWGSLNLSLSVQSCMNLGTYLNTTLNPYIINVTLAAKMCSQVLCHDGGVCTRKHWNSSDYLHLNPMNFAIQTGEGGKYTVPGTLTLEDLQKFSDTFYCSCYSNLSCKKRVDIKNVHSVDVCMAEDVCIDAFLKPP

SEQ ID NO: 18 - protein, 439 aa, Bos taurus
  mature cow PH20
LDFRAPPLISNTSFLWAWNAPVERCVNRRFQLPPDLRLFSVKGSPQKSATGQFITLFYADRLGYYPHIDEKTGKTVFGGIPQLGNLKSHLEKAKNDIAYYIPNDSVGLAVIDWENWRPTWARNWKPKDVYRDESVELVLQKNPQLSFPEASKIAKVDFETAGKSFMQETLKLGKLLRPNHLWGYYLFPDCYNHNHNQPTYNGNCPDVEKRRNDDLEWLWKESTALFPSVYLNIRLKSTQNAALYVRNRVQEAIRLSKIASVESPLPVFVYARPVFTDGSSTYLSQGDLVNSVGEIVSLGASGIIMWGSLNLSLSVQSCMNLGTYLNTTLNPYIINVTLAAKMCSQVLCHDGGVCTRKHWNSSDYLHLNPMNFAIQTGEGGKYTVPGTLTLEDLQKFSDTFYCSCYSNLSCKKRVDIKNVHSVDVCMAEDVCIDAFLKPP

SEQ ID NO: 19 - protein, 512 aa, Mus musculus
  Precursor mouse PH20
  ref <308>: DATABASE ACCESSION NUMBER: NCBI: NP_001073344.1
  ref <309>: DATABASE ENTRY DATE: 2012-12-12
MGELRFKHLFWGSFVESGGTFQTVLIFLLIPCSLTVDYRAAPILSNTTFLWIWNVPTERCVGNVNDPIDLSFFSLIGSPRKTATGQPVTLFYVDRLGLYPHIDANQAEHYGGIPQRGDYQAHLRKAKTDIEHYIPDDKLGLAIIDWEEWRPTWLRNWKPKDNYRNKSIELVQSTNPGLSITEATQKAIQQFEEAGRKFMEGTLHLGKFLRPNQLWGYYLFPDCYNNKFQDPKYDGQCPAVEKKRNDNLKWLWKASTGLYPSVYLKKDLKSNRQATLYVRYRVVEAIRVSKVGNASDPVPIFVYIRLVFTDRTSEYLLEDDLVNTIGEIVALGTSGIIIWDAMSLAQRAAGCPILHKYMQTTLNPYIVNVTLAAKMCSQTLCNEKGMCSRRKESSDVYLHLNPSHFDIMLTETGKYEVLGNPRVGDLEYFSEHFKCSCFSRMTCKETSDVKNVQDVNVCVGDNVCIKAKVEPNPAFYLLPGKSLLFMTTLGHVLYHLPQDIFVFPRKTLVSTP

SEQ ID NO: 20 - protein, 477 aa, Mus musculus
  Mature mouse PH20
VDYRAAPILSNTTFLWIWNVPTERCVGNVNDPIDLSFFSLIGSPRKTATGQPVTLFYVDRLGLYPHIDANQAEHYGGIPQRGDYQAHLRKAKTDIEHYIPDDKLGLAIIDWEEWRPTWLRNWKPKDNYRNKSIELVQSTNPGLSITEATQKAIQQFEEAGRKFMEGTLHLGKFLRPNQLWGYYLFPDCYNNKFQDPKYDGQCPAVEKKRNDNLKWLWKASTGLYPSVYLKKDLKSNRQATLYVRYRVVEAIRVSKVGNASDPVPIFVYIRLVFTDRTSEYLLEDDLVNTIGEIVALGTSGIIIWDAMSLAQRAAGCPILHKYMQTTLNPYIVNVTLAAKMCSQTLCNEKGMCSRRKESSDVYLHLNPSHFDIMLTETGKYEVLGNPRVGDLEYFSEHFKCSCFSRMTCKETSDVKNVQDVNVCVGDNVCIKAKVEPNPAFYLLPGKSLLFMTTLGHVLYHLPQDIFVFPRKTLVSTP

SEQ ID NO: 21 - protein, 512 aa, Rattus norvegicus
  Precursor rat PH20
  ref <308>: DATABASE ACCESSION NUMBER: NCBI: NP_446419.1
  ref <309>: DATABASE ENTRY DATE: 2012-08-30
MGELQFKWLFWRSFAESGGTFQTVLIFLFIPYSLTVDYRATPVLSDTTFVWVWNVPTEACVENVTEPIDLSFFSLIGSPRKTAIGQPVTLFYVDRLGNYPHIDAQQTEHHGGIPQKGDLTTHLVKAKEDVERYIPTDKLGLAIIDWEEWRPTWMRNWTPKDIYRNKSIELVQAADPAINITEATVRAKAQFEGAAKEFMEGTLKLGKHIRPKHLWGFYLFPDCYNNKFQVDNYDGQCPDVEKKRNDDLDWLWKESTGLYPSVYLKKDLKSSRKATLYVRYRVLESIRVSKVSDESNPVPIFVYIRLVFTDHVSEYLLEDDLVNTIGEIVAQGTSGIIIWDAMSLAQRSAGCPILRQYMKTTLNPYIVNVTLAAKMCSQTLCKEKGMCSRKTESSDAYLHLDPSSFSINVTEAGKYEVLGKPEVKDLEYFSEHFKCSCFSKMTCEETSDMRSIQDVNVCMGDNVCIKATLGPNSAFHLLPGKGLLLMTTLAHILHHLPHDIFVFPWKMLVSTP

SEQ ID NO: 22 - protein, 477 aa, Rattus norvegicus
  Mature rat PH20
VDYRATPVLSDTTFVWVWNVPTEACVENVTEPIDLSFFSLIGSPRKTAIGQPVTLFYVDRLGNYPHIDAQQTEHHGGIPQKGDLTTHLVKAKEDVERYIPTDKLGLAIIDWEEWRPTWMRNWTPKDIYRNKSIELVQAADPAINITEATVRAKAQFEGAAKEFMEGTLKLGKHIRPKHLWGFYLFPDCYNNKFQVDNYDGQCPDVEKKRNDDLDWLWKESTGLYPSVYLKKDLKSSRKATLYVRYRVLESIRVSKVSDESNPVPIFVYIRLVFTDHVSEYLLEDDLVNTIGEIVAQGTSGIIIWDAMSLAQRSAGCPILRQYMKTTLNPYIVNVTLAAKMCSQTLCKEKGMCSRKTESSDAYLHLDPSSFSINVTEAGKYEVLGKPEVKDLEYFSEHFKCSCFSKMTCEETSDMRSIQDVNVCMGDNVCIKATLGPNSAFHLLPGKGLLLMTTLAHILHHLPHDIFVFPWKMLVSTP

SEQ ID NO: 23 - protein, 545 aa, Oryctolagus cuniculus
  Precursor rabbit PH20
  ref <308>: DATABASE ACCESSION NUMBER: NCBI: NP_001076141.1
  ref <309>: DATABASE ENTRY DATE: 2012-10-06
MGVLKFKHIFFGSAVELSGVFQIVFIFLLIPCCLTANFRAPPVIPNVPFLWAWNAPTEFCLGKSGEPLDMSLFSLFGSPRKNKTGQGITIFYVDRLGYYPYIDPHTGAIVHGRIPQLGPLQQHLTKLRQEILYYMPKDNVGLAVIDWEEWLPTWLRNWKPKDIYRIKSIELVKSQHPQYNHSYATEKAKRDFEKAGKDFMEETLKLGRLLRPNHLWGYYLFPDCYNHHYDKPNLYKGSCFDIEKKRNDDLSWLWKESTALFPSVYLTSRARSATALSKLYVVRNRVHEAIRVSKIPDDKSPLPNFVYTRLVFTDQIFQFLSHHDLVYTIGEIVALGASGIVVWGSQSLARSMKSCLHLDNYMKTILNPYLINVTLAAKMCNQVLCQEQGVCTRKNWNPNDYLHLNPGNFAIQLGSNGTYKVDGKPTLTDLEQFSKNFQCSCYTNLNCKERTDMNNVRTVNVCAVENVCIDTNVGPQAVTYAPKEKKDVAHILSNTTSINSSTTMSLPFPRKHVSGCLLVLCMYSQYLNICYRLVAIGIQHGYYLK

SEQ ID NO: 24 - protein, 510 aa, Oryctolagus cuniculus
  Mature rabbit PH20
ANFRAPPVIPNVPFLWAWNAPTEFCLGKSGEPLDMSLFSLFGSPRKNKTGQGITIFYVDRLGYYPYIDPHTGAIVHGRIPQLGPLQQHLTKLRQEILYYMPKDNVGLAVIDWEEWLPTWLRNWKPKDIYRIKSIELVKSQHPQYNHSYATEKAKRDFEKAGKDFMEETLKLGRLLRPNHLWGYYLFPDCYNHHYDKPNLYKGSCFDIEKKRNDDLSWLWKESTALFPSVYLTSRARSATALSKLYVVRNRVHEAIRVSKIPDDKSPLPNFVYTRLVFTDQIFQFLSHHDLVYTIGEIVALGASGIVVWGSQSLARSMKSCLHLDNYMKTILNPYLINVTLAAKMCNQVLCQEQGVCTRKNWNPNDYLHLNPGNFAIQLGSNGTYKVDGKPTLTDLEQFSKNFQCSCYTNLNCKERTDMNNVRTVNVCAVENVCIDTNVGPQAVTYAPKEKKDVAHILSNTTSINSSTTMSLPFPRKHVSGCLLVLCMYSQYLNICYRLVAIGIQHGYYLK

SEQ ID NO: 25 - protein, 114 aa, Ovis aries
  Sheep PH20
LYVRNRVREAIRLSKIASVESPLPVFVYHRPVFTDGSSTYLSQGDLVNSVGEIVALGASGIIMWGSLNLSLTMQSCMNLGNYLNTTLNPYIINVTLAAKMCSQVLCQEQGVCIR

SEQ ID NO: 26 - protein, 520 aa, Ovis aries
  Sheep PH20
LDFPAPPLISNTSFLWAWNAPAERCVKIFKLPPDLRLFSVKGSPQKSATGQFITLFYADRLGYYPHIDEKTGNTVYGGIPQLGNLKNHLEKAKKDIAYYIPNDSVGLAVIDWENWRPTWARNWKPKDVYRDESVELVLQKNPQLSFPEASKIAKVDFETAGKSFMQETLKLGKLLRPNHLWGYYLFPDCYNHNYNQPTYNGNCSDLEKRRNDDLDWLWKESTALFPSVYLNIKLKSTPKAAFYVRNRVQEAIRLSKIASVESPLPVFVYHRPVFTDGSSTYLSQGDLVNSVGEIVALGASGIIMWGSLNLSLTMQSCMNLGNYNTTLNPYIINVTLAAKMCSQVLCHDEGVCTRKQWNSSDYLHLNPIMNFAIQTGKGGKYTVPGKVTLEDLQTFSDKFYCSCYANINCKKRVDIKNVHSVNVCMAEDICIEGPVKLQPSDHSSSQNEASTTTVSSISPSTTATTVVSPCTPEKQSPECLKVRCLEAIANVTQTGCQGVKWKNTSSQSQSSIQNIKNQTT

SEQ ID NO: 27 - protein, 517 aa, Ovis aries
  Sheep PH20
DFRAPPLISNTSFLWAWNAPAERCIKIFKLPPDLRLFSVKGSPQKSATGQFITLFYADRLGYYPHIDEKTGNTVYGGIPQLGNLKNHLEKAKKDIAYYIPNDSVGLAVIDWENWRPTWARNWKPKDVYRDESVELVLQKNPQLSFPEASKIAKVDFETAGKSFMQETLKLGKLLRPNHLWGYYLFPDCYNHNYNQPTYNGNCSDLEKRRNDDLDWLWKESTALFPSVYLNIKLKSTPKAAFYVRNRVQEAIRLSKIASVESPLPVFVYHRPVFTDGSSTYLSQGDLVNSVGEIVALGASGIIMWGSLNLSLTMQSCMNLGNYLNTTLNPYIINVTLAAKMCSQVLCHDEGVCTRKQWNSSDYLHLNPMNFAIQTGKGGKYTVPGKVTLEDLQTFSDKFYCSCYANINCKKRVDIKNVHSVNVCMAEDICIEGPVKLQPSDHSSSQNEASTTTVSSISPSTTATTVSPCTPEKQSPECLKVRCLEAIANVTQTGCQGVKWKNTSSQSSIQNIKNQTTY

SEQ ID NO: 28 - protein, 529 aa, Cavia porcellus
  Precursor guinea pig PH20
  ref <308>: DATABASE ACCESSION NUMBER: NCBI: NP_001166492.1
  ref <309>: DATABASE ENTRY DATE: 2012-11-17
MGAFTFKHSFFGSFVECSGVLQTVFIFLLIPCCLADKRAPPLIPNVPLLWVWNAPTEFCIGGTNQPLDMSFFSIVGTPRKNITGQSITLYYVDRLGYYPYIDPHTGAIVHGGLPQLMNLQQHLRKSRQDILFYMPTDSVGLAVIDWEEWRPTWTRNWRPKDIYRNKSIELVKSQHPQYNHSYAVAVAKRDFERTGKAFMLETLKLGKSLRPSSLWGYYLFPDCYNTHFTKPNYDGHCPPIELQRNNDLQWLWNDSTALYPSVYLTSRVRSSQNGALYVRNRVHESIRVSKLMDDKNPLPIYVYIRLVFTDQTTTFLELDDLVHSVGEIVPLGVSGIIIWGSLSLTRSLVSCIGLENYMKGTLLPYLINVTLAAKMCGQVLCKNQGICTRKDWNTNTYLHLNATNFDIELQQNGKFVVHGKPSLEDLQEFSKNFHCSCYTNVACKDRLDVHNVRSVNVCTANNICIDAVLNFPSLDDDDEPPITDDTSQNQDSISDITSSAPPSSHILPKDLSWCLFLLSIFSQHWKYLL

SEQ ID NO: 29 - protein, 494 aa, Cavia porcellus
  mature guinea pig PH20
  ref <308>: DATABASE ACCESSION NUMBER: NCBI: NP_001166492.1
  ref <309>: DATABASE ENTRY DATE: 2012-11-17
DKRAPPLIPNVPLLWVWNAPTEFCIGGTNQPLDMSFFSIVGTPRKNITGQSITLYYVDRLGYYPYIDPHTGAIVHGGLPQLMNLQQHLRKSRQDILFYMPTDSVGLAVIDWEEWRPTWTRNWRPKDIYRNKSIELVKSQHPQYNHSYAVAVAKRDFERTGKAFMLETLKLGKSLRPSSLWGYYLFPDCYNTHFTKPNYDGHCPPIELQRNNDLQWLWNDSTALYPSVYLTSRVRSSQNGALYVRNRVHESIRVSKLMDDKNPLPIYVYIRLVFTDQTTTFLELDDLVHSVGEIVPLGVSGIIIWGSLSLTRSLVSCIGLENYMKGTLLPYLINVTLAAKMCGQVLCKNQGICTRKDWNTNTYLHLNATNFDIELQQNGKFVVHGKPSLEDLQEFSKNFHCSCYTNVACKDRLDVHNVRSVNVCTANNICIDAVLNFPSLDDDDEPPITDDTSQNQDSISDITSSAPPSSHILPKDLSWCLFLLSIFSQHWKYLL

SEQ ID NO: 30 - protein, 540 aa, Vulpes vulpes
  Precursor Red Fox PH20
  ref <308>: DATABASE ACCESSION NUMBER: UniProtKB: Q29152
  ref <309>: DATABASE ENTRY DATE: 2006-11-28
MGVLRFQNIFFRSFLGSSGTTQAVFIFLLIPRCLTQEFRAPPFIPNVSFLWGWNAPTELCAKRFNVQLDLNLFSLIGSPLKTVVGQGIAIFYADRLGYYPHINKTTGKHVNGGIPQLGSLKKHLDKAKKDISHYIETDSMGLAVIDWDSWRPNWARNWRPKHIYKEQSIDLAQQQHIHLNLTEVTQIAQADFEKAARCFMQETLKLGKFLRPNYLWGFYLYPDCYNYNYKNPNYNGSCYDIEERRNDEIDWLWKESTALFPSIYLKSKLKSSPFTALYVRNRVLEAIRVSKVKDIKHPLPIFVYARPVFTDVLLTYLTEDDLVNTIGESVSLGVSGIVMWGSLNLTENVQICTELDTYIKNKLNPYIINVTLAAKMCSQVLCQDEGVCIRKHWNSNDYLHLNPVNFAIQLERSGRYTVQGKPTLEDLQQFSKKFYCACYANTHCRERVDMTDIHTIKVCVGEDVCIDVYLNLVPSGHLPVWKGKYVTSSNIFSVMPPATGPPCVPGRDLNRCLKARFIVEDNSKTTQTGYQSIYIKNKKQ

SEQ ID NO: 31 - protein, 505 aa, Vulpes vulpes
  Mature Red Fox PH20
QEFRAPPFIPNVSFLWGWNAPTELCAKRFNVQLDLNLFSLIGSPLKTVVGQGIAIFYADRLGYYPHINKTTGKHVNGGIPQLGSLKKHLDKAKKDISHYIETDSMGLAVIDWDSWRPNWARNWRPKHIYKEQSIDLAQQQHIHLNLTEVTQIAQADFEKAARCFMQETLKLGKFLRPNYLWGFYLYPDCYNYNYKNPNYNGSCYDIEERRNDEIDWLWKESTALFPSIYLKSKLKSSPFTALYVRNRVLEAIRVSKVKDIKHPLPIFVYARPVFTDVLLTYLTEDDLVNTIGESVSLGVSGIVMWGSLNLTENVQICTELDTYIKNKLNPYIINVTLAAKMCSQVLCQDEGVCIRKHWNSNDYLHLNPVNFAIQLERSGRYTVQGKPTLEDLQQFSKKFYCACYANTHCRERVDMTDIHTIKVCVGEDVCIDVYLNLVPSGHLPVWKGKYVTSSNIFSVMPPATGPPCVPGRDLNRCLKARFIVEDNSKTTQTGYQSIYIKNKKQ

SEQ ID NO: 32 - protein, 430 aa, Homo sapiens
  Mature human PH20 36-465
LNFRAPPVIPNVPFLWAWNAPSEFCLGKFDEPLDMSLFSFIGSPRINATGQGVTIFYVDRLGYYPYIDSITGVTVNGGIPQKISLQDHLDKAKKDITFYMPVDNLGMAVIDWEEWRPTWARNWKPKDVYKNRSIELVQQQNVQLSLTEATEKAKQEFEKAGKDFLVETIKLGKLLRPNHLWGYYLFPDCYNHHYKKPGYNGSCFNVEIKRNDDLSWLWNESTALYPSIYLNTQQSPVAATLYVRNRVREAIRVSKIPDAKSPLPVFAYTRIVFTDQVLKFLSQDELVYTFGETVALGASGIVIWGTLSIMRSMKSCLLLDNYMETILNPYIINVTLAAKMCSQVLCQEQGVCIRKNWNSSDYLHLNPDNFAIQLEKGGKFTVRGKPTLEDLEQFSEKFYCSCYSTLSCKEKADVKDTDAVDVCIADGVCI

SEQ ID NO: 33 - protein, 431 aa, Homo Sapiens
  mature human PH20 36-466
LNFRAPPVIPNVPFLWAWNAPSEFCLGKFDEPLDMSLFSFIGSPRINATGQGVTIFYVDRLGYYPYIDSITGVTVNGGIPQKISLQDHLDKAKKDITFYMPVDNLGMAVIDWEEWRPTWARNWKPKDVYKNRSIELVQQQNVQLSLTEATEKAKQEFEKAGKDFLVETIKLGKLLRPNHLWGYYLFPDCYNHHYKKPGYNGSCFNVEIKRNDDLSWLWNESTALYPSIYLNTQQSPVAATLYVRNRVREAIRVSKIPDAKSPLPVFAYTRIVFTDQVLKFLSQDELVYTFGETVALGASGIVIWGTLSIMRSMKSCLLLDNYMETILNPYIINVTLAAKMCSQVLCQEQGVCIRKNWNSSDYLHLNPDNFAIQLEKGGKFTVRGKPTLEDLEQFSEKFYCSCYSTLSCKEKADVKDTDAVDVCIADGVCID

SEQ ID NO: 34 - protein, 432 aa, Homo sapiens
  mature human PH20 36-467
LNFRAPPVIPNVPFLWAWNAPSEFCLGKFDEPLDMSLFSFIGSPRINATGQGVTIFYVDRLGYYPYIDSITGVTVNGGIPQKISLQDHLDKAKKDITFYMPVDNLGMAVIDWEEWRPTWARNWKPKDVYKNRSIELVQQQNVQLSLTEATEKAKQEFEKAGKDFLVETIKLGKLLRPNHLWGYYLFPDCYNHHYKKPGYNGSCFNVEIKRNDDLSWLWNESTALYPSIYLNTQQSPVAATLYVRNRVREAIRVSKIPDAKSPLPVFAYTRIVFTDQVLKFLSQDELVYTFGETVALGASGIVIWGTLSIMRSMKSCLLLDNYMETILNPYIINVTLAAKMCSQVLCQEQGVCIRKNWNSSDYLHLNPDNFAIQLEKGGKFTVRGKPTLEDLEQFSEKFYCSCYSTLSCKEKADVKDTDAVDVCIADGVCIDA

SEQ ID NO: 35 - protein, 433 aa, Homo Sapiens
  mature human PH20 36-468
LNFRAPPVIPNVPFLWAWNAPSEFCLGKFDEPLDMSLFSFIGSPRINATGQGVTIFYVDRLGYYPYIDSITGVTVNGGIPQKISLQDHLDKAKKDITFYMPVDNLGMAVIDWEEWRPTWARNWKPKDVYKNRSIELVQQQNVQLSLTEATEKAKQEFEKAGKDFLVETIKLGKLLRPNHLWGYYLFPDCYNHHYKKPGYNGSCFNVEIKRNDDLSWLWNESTALYPSIYLNTQQSPVAATLYVRNRVREAIRVSKIPDAKSPLPVFAYTRIVFTDQVLKFLSQDELVYTFGETVALGASGIVIWGTLSIMRSMKSCLLLDNYMETILNPYIINVTLAAKMCSQVLCQEQGVCIRKNWNSSDYLHLNPDNFAIQLEKGGKFTVRGKPTLEDLEQFSEKFYCSCYSTLSCKEKADVKDTDAVDVCIADGVCIDAF

SEQ ID NO: 36 - protein, 434 aa, Homo Sapiens
  mature human PH20 36-469
LNFRAPPVIPNVPFLWAWNAPSEFCLGKFDEPLDMSLFSFIGSPRINATGQGVTIFYVDRLGYYPYIDSITGVTVNGGIPQKISLQDHLDKAKKDITFYMPVDNLGMAVIDWEEWRPTWARNWKPKDVYKNRSIELVQQQNVQLSLTEATEKAKQEFEKAGKDFLVETIKLGKLLRPNHLWGYYLFPDCYNHHYKKPGYNGSCFNVEIKRNDDLSWLWNESTALYPSIYLNTQQSPVAATLYVRNRVREAIRVSKIPDAKSPLPVFAYTRIVFTDQVLKFLSQDELVYTFGETVALGASGIVIWGTLSIMRSMKSCLLLDNYMETILNPYIINVTLAAKMCSQVLCQEQGVCIRKNWNSSDYLHLNPDNFAIQLEKGGKFTVRGKPTLEDLEQFSEKFYCSCYSTLSCKEKADVKDTDAVDVCIADGVCIDAFL

SEQ ID NO: 37 - protein, 435 aa, Homo Sapiens
  mature human PH20 36-470
LNFRAPPVIPNVPFLWAWNAPSEFCLGKFDEPLDMSLFSFIGSPRINATGQGVTIFYVDRLGYYPYIDSITGVTVNGGIPQKISLQDHLDKAKKDITFYMPVDNLGMAVIDWEEWRPTWARNWKPKDVYKNRSIELVQQQNVQLSLTEATEKAKQEFEKAGKDFLVETIKLGKLLRPNHLWGYYLFPDCYNHHYKKPGYNGSCFNVEIKRNDDLSWLWNESTALYPSIYLNTQQSPVAATLYVRNRVREAIRVSKIPDAKSPLPVFAYTRIVFTDQVLKFLSQDELVYTFGETVALGASGIVIWGTLSIMRSMKSCLLLDNYMETILNPYIINVTLAAKMCSQVLCQEQGVCIRKNWNSSDYLHLNPDNFAIQLEKGGKFTVRGKPTLEDLEQFSEKFYCSCYSTLSCKEKADVKDTDAVDVCIADGVCIDAFLK

SEQ ID NO: 38 - protein, 436 aa, Homo Sapiens
  mature human PH20 36-471
LNFRAPPVIPNVPFLWAWNAPSEFCLGKFDEPLDMSLFSFIGSPRINATGQGVTIFYVDRLGYYPYIDSITGVTVNGGIPQKISLQDHLDKAKKDITFYMPVDNLGMAVIDWEEWRPTWARNWKPKDVYKNRSIELVQQQNVQLSLTEATEKAKQEFEKAGKDFLVETIKLGKLLRPNHLWGYYLFPDCYNHHYKKPGYNGSCFNVEIKRNDDLSWLWNESTALYPSIYLNTQQSPVAATLYVRNRVREAIRVSKIPDAKSPLPVFAYTRIVFTDQVLKFLSQDELVYTFGETVALGASGIVIWGTLSIMRSMKSCLLLDNYMETILNPYIINVTLAAKMCSQVLCQEQGVCIRKNWNSSDYLHLNPDNFAIQLEKGGKFTVRGKPTLEDLEQFSEKFYCSCYSTLSCKEKADVKDTDAVDVCIADGVCIDAFLKP

SEQ ID NO: 39 - protein, 437 aa, Homo Sapiens
  mature human PH20 36-472
LNFRAPPVIPNVPFLWAWNAPSEFCLGKFDEPLDMSLFSFIGSPRINATGQGVTIFYVDRLGYYPYIDSITGVTVNGGIPQKISLQDHLDKAKKDITFYMPVDNLGMAVIDWEEWRPTWARNWKPKDVYKNRSIELVQQQNVQLSLTEATEKAKQEFEKAGKDFLVETIKLGKLLRPNHLWGYYLFPDCYNHHYKKPGYNGSCFNVEIKRNDDLSWLWNESTALYPSIYLNTQQSPVAATLYVRNRVREAIRVSKIPDAKSPLPVFAYTRIVFTDQVLKFLSQDELVYTFGETVALGASGIVIWGTLSIMRSMKSCLLLDNYMETILNPYIINVTLAAKMCSQVLCQEQGVCIRKNWNSSDYLHLNPDNFAIQLEKGGKFTVRGKPTLEDLEQFSEKFYCSCYSTLSCKEKADVKDTDAVDVCIADGVCIDAFLKPP

SEQ ID NO: 40 - protein, 438 aa, Homo Sapiens
  mature human PH20 36-473
LNFRAPPVIPNVPFLWAWNAPSEFCLGKFDEPLDMSLFSFIGSPRINATGQGVTIFYVDRLGYYPYIDSITGVTVNGGIPQKISLQDHLDKAKKDITFYMPVDNLGMAVIDWEEWRPTWARNWKPKDVYKNRSIELVQQQNVQLSLTEATEKAKQEFEKAGKDFLVETIKLGKLLRPNHLWGYYLFPDCYNHHYKKPGYNGSCFNVEIKRNDDLSWLWNESTALYPSIYLNTQQSPVAATLYVRNRVREAIRVSKIPDAKSPLPVFAYTRIVFTDQVLKFLSQDELVYTFGETVALGASGIVIWGTLSIMRSMKSCLLLDNYMETILNPYIINVTLAAKMCSQVLCQEQGVCIRKNWNSSDYLHLNPDNFAIQLEKGGKFTVRGKPTLEDLEQFSEKFYCSCYSTLSCKEKADVKDTDAVDVCIADGVCIDAFLKPPM

SEQ ID NO: 41 - protein, 439 aa, Homo Sapiens
  mature human PH20 36-474
LNFRAPPVIPNVPFLWAWNAPSEFCLGKFDEPLDMSLFSFIGSPRINATGQGVTIFYVDRLGYYPYIDSITGVTVNGGIPQKISLQDHLDKAKKDITFYMPVDNLGMAVIDWEEWRPTWARNWKPKDVYKNRSIELVQQQNVQLSLTEATEKAKQEFEKAGKDFLVETIKLGKLLRPNHLWGYYLFPDCYNHHYKKPGYNGSCFNVEIKRNDDLSWLWNESTALYPSIYLNTQQSPVAATLYVRNRVREAIRVSKIPDAKSPLPVFAYTRIVFTDQVLKFLSQDELVYTFGETVALGASGIVIWGTLSIMRSMKSCLLLDNYMETILNPYIINVTLAAKMCSQVLCQEQGVCIRKNWNSSDYLHLNPDNFAIQLEKGGKFTVRGKPTLEDLEQFSEKFYCSCYSTLSCKEKADVKDTDAVDVCIADGVCIDAFLKPPME

SEQ ID NO: 42 - protein, 440 aa, Homo Sapiens
  mature human PH20 36-475
LNFRAPPVIPNVPFLWAWNAPSEFCLGKFDEPLDMSLFSFIGSPRINATGQGVTIFYVDRLGYYPYIDSITGVTVNGGIPQKISLQDHLDKAKKDITFYMPVDNLGMAVIDWEEWRPTWARNWKPKDVYKNRSIELVQQQNVQLSLTEATEKAKQEFEKAGKDFLVETIKLGKLLRPNHLWGYYLFPDCYNHHYKKPGYNGSCFNVEIKRNDDLSWLWNESTALYPSIYLNTQQSPVAATLYVRNRVREAIRVSKIPDAKSPLPVFAYTRIVFTDQVLKFLSQDELVYTFGETVALGASGIVIWGTLSIMRSMKSCLLLDNYMETILNPYIINVTLAAKMCSQVLCQEQGVCIRKNWNSSDYLHLNPDNFAIQLEKGGKFTVRGKPTLEDLEQFSEKFYCSCYSTLSCKEKADVKDTDAVDVCIADGVCIDAFLKPPMET

SEQ ID NO: 43 - protein, 441 aa, Homo Sapiens
  mature human PH20 36-476
LNFRAPPVIPNVPFLWAWNAPSEFCLGKFDEPLDMSLFSFIGSPRINATGQGVTIFYVDRLGYYPYIDSITGVTVNGGIPQKISLQDHLDKAKKDITFYMPVDNLGMAVIDWEEWRPTWARNWKPKDVYKNRSIELVQQQNVQLSLTEATEKAKQEFEKAGKDFLVETIKLGKLLRPNHLWGYYLFPDCYNHHYKKPGYNGSCFNVEIKRNDDLSWLWNESTALYPSIYLNTQQSPVAATLYVRNRVREAIRVSKIPDAKSPLPVFAYTRIVFTDQVLKFLSQDELVYTFGETVALGASGIVIWGTLSIMRSMKSCLLLDNYMETILNPYIINVTLAAKMCSQVLCQEQGVCIRKNWNSSDYLHLNPDNFAIQLEKGGKFTVRGKPTLEDLEQFSEKFYCSCYSTLSCKEKADVKDTDAVDVCIADGVCIDAFLKPPMETE

SEQ ID NO: 44 - protein, 442 aa, Homo sapiens
  mature human PH20 36-477
LNFRAPPVIPNVPFLWAWNAPSEFCLGKFDEPLDMSLFSFIGSPRINATGQGVTIFYVDRLGYYPYIDSITGVTVNGGIPQKISLQDHLDKAKKDITFYMPVDNLGMAVIDWEEWRPTWARNWKPKDVYKNRSIELVQQQNVQLSLTEATEKAKQEFEKAGKDFLVETIKLGKLLRPNHLWGYYLFPDCYNHHYKKPGYNGSCFNVEIKRNDDLSWLWNESTALYPSIYLNTQQSPVAATLYVRNRVREAIRVSKIPDAKSPLPVFAYTRIVFTDQVLKFLSQDELVYTFGETVALGASGIVIWGTLSIMRSMKSCLLLDNYMETILNPYIINVTLAAKMCSQVLCQEQGVCIRKNWNSSDYLHLNPDNFAIQLEKGGKFTVRGKPTLEDLEQFSEKFYCSCYSTLSCKEKADVKDTDAVDVCIADGVCIDAFLKPPMETEE

SEQ ID NO: 45 - protein, 443 aa, Homo sapiens
  mature human PH20 36-478
LNFRAPPVIPNVPFLWAWNAPSEFCLGKFDEPLDMSLFSFIGSPRINATGQGVTIFYVDRLGYYPYIDSITGVTVNGGIPQKISLQDHLDKAKKDITFYMPVDNLGMAVIDWEEWRPTWARNWKPKDVYKNRSIELVQQQNVQLSLTEATEKAKQEFEKAGKDFLVETIKLGKLLRPNHLWGYYLFPDCYNHHYKKPGYNGSCFNVEIKRNDDLSWLWNESTALYPSIYLNTQQSPVAATLYVRNRVREAIRVSKIPDAKSPLPVFAYTRIVFTDQVLKFLSQDELVYTFGETVALGASGIVIWGTLSIMRSMKSCLLLDNYMETILNPYIINVTLAAKMCSQVLCQEQGVCIRKNWNSSDYLHLNPDNFAIQLEKGGKFTVRGKPTLEDLEQFSEKFYCSCYSTLSCKEKADVKDTDAVDVCIADGVCIDAFLKPPMETEEP

SEQ ID NO: 46 - protein, 444 aa, Homo Sapiens
  mature human PH20 36-479
LNFRAPPVIPNVPFLWAWNAPSEFCLGKFDEPLDMSLFSFIGSPRINATGQGVTIFYVDRLGYYPYIDSITGVTVNGGIPQKISLQDHLDKAKKDITFYMPVDNLGMAVIDWEEWRPTWARNWKPKDVYKNRSIELVQQQNVQLSLTEATEKAKQEFEKAGKDFLVETIKLGKLLRPNHLWGYYLFPDCYNHHYKKPGYNGSCFNVEIKRNDDLSWLWNESTALYPSIYLNTQQSPVAATLYVRNRVREAIRVSKIPDAKSPLPVFAYTRIVFTDQVLKFLSQDELVYTFGETVALGASGIVIWGTLSIMRSMKSCLLLDNYMETILNPYIINVTLAAKMCSQVLCQEQGVCIRKNWNSSDYLHLNPDNFAIQLEKGGKFTVRGKPTLEDLEQFSEKFYCSCYSTLSCKEKADVKDTDAVDVCIADGVCIDAFLKPPMETEEPQ

SEQ ID NO: 47 - protein, 445 aa, Homo sapiens
  mature human PH20 36-480
LNFRAPPVIPNVPFLWAWNAPSEFCLGKFDEPLDMSLFSFIGSPRINATGQGVTIFYVDRLGYYPYIDSITGVTVNGGIPQKISLQDHLDKAKKDITFYMPVDNLGMAVIDWEEWRPTWARNWKPKDVYKNRSIELVQQQNVQLSLTEATEKAKQEFEKAGKDFLVETIKLGKLLRPNHLWGYYLFPDCYNHHYKKPGYNGSCFNVEIKRNDDLSWLWNESTALYPSIYLNTQQSPVAATLYVRNRVREAIRVSKIPDAKSPLPVFAYTRIVFTDQVLKFLSQDELVYTFGETVALGASGIVIWGTLSIMRSMKSCLLLDNYMETILNPYIINVTLAAKMCSQVLCQEQGVCIRKNWNSSDYLHLNPDNFAIQLEKGGKFTVRGKPTLEDLEQFSEKFYCSCYSTLSCKEKADVKDTDAVDVCIADGVCIDAFLKPPMETEEPQI

SEQ ID NO: 48 - protein, 446 aa, Homo Sapiens
  mature human PH20 36-481
LNFRAPPVIPNVPFLWAWNAPSEFCLGKFDEPLDMSLFSFIGSPRINATGQGVTIFYVDRLGYYPYIDSITGVTVNGGIPQKISLQDHLDKAKKDITFYMPVDNLGMAVIDWEEWRPTWARNWKPKDVYKNRSIELVQQQNVQLSLTEATEKAKQEFEKAGKDFLVETIKLGKLLRPNHLWGYYLFPDCYNHHYKKPGYNGSCFNVEIKRNDDLSWLWNESTALYPSIYLNTQQSPVAATLYVRNRVREAIRVSKIPDAKSPLPVFAYTRIVFTDQVLKFLSQDELVYTFGETVALGASGIVIWGTLSIMRSMKSCLLLDNYMETILNPYIINVTLAAKMCSQVLCQEQGVCIRKNWNSSDYLHLNPDNFAIQLEKGGKFTVRGKPTLEDLEQFSEKFYCSCYSTLSCKEKADVKDTDAVDVCIADGVCIDAFLKPPMETEEPQIF

SEQ ID NO: 49 - protein, 448 aa, Homo sapiens
  mature human PH20 36-483
LNFRAPPVIPNVPFLWAWNAPSEFCLGKFDEPLDMSLFSFIGSPRINATGQGVTIFYVDRLGYYPYIDSITGVTVNGGIPQKISLQDHLDKAKKDITFYMPVDNLGMAVIDWEEWRPTWARNWKPKDVYKNRSIELVQQQNVQLSLTEATEKAKQEFEKAGKDFLVETIKLGKLLRPNHLWGYYLFPDCYNHHYKKPGYNGSCFNVEIKRNDDLSWLWNESTALYPSIYLNTQQSPVAATLYVRNRVREAIRVSKIPDAKSPLPVFAYTRIVFTDQVLKFLSQDELVYTFGETVALGASGIVIWGTLSIMRSMKSCLLLDNYMETILNPYIINVTLAAKMCSQVLCQEQGVCIRKNWNSSDYLHLNPDNFAIQLEKGGKFTVRGKPTLEDLEQFSEKFYCSCYSTLSCKEKADVKDTDAVDVCIADGVCIDAFLKPPMETEEPQIFYN

SEQ ID NO: 50 - protein, 449 aa, Homo sapiens
  mature human PH20 36-484
LNFRAPPVIPNVPFLWAWNAPSEFCLGKFDEPLDMSLFSFIGSPRINATGQGVTIFYVDRLGYYPYIDSITGVTVNGGIPQKISLQDHLDKAKKDITFYMPVDNLGMAVIDWEEWRPTWARNWKPKDVYKNRSIELVQQQNVQLSLTEATEKAKQEFEKAGKDFLVETIKLGKLLRPNHLWGYYLFPDCYNHHYKKPGYNGSCFNVEIKRNDDLSWLWNESTALYPSIYLNTQQSPVAATLYVRNRVREAIRVSKIPDAKSPLPVFAYTRIVFTDQVLKFLSQDELVYTFGETVALGASGIVIWGTLSIMRSMKSCLLLDNYMETILNPYIINVTLAAKMCSQVLCQEQGVCIRKNWNSSDYLHLNPDNFAIQLEKGGKFTVRGKPTLEDLEQFSEKFYCSCYSTLSCKEKADVKDTDAVDVCIADGVCIDAFLKPPMETEEPQIFYNA

SEQ ID NO: 51 - protein, 450 aa, Homo Sapiens
  mature human PH20 36-485
LNFRAPPVIPNVPFLWAWNAPSEFCLGKFDEPLDMSLFSFIGSPRINATGQGVTIFYVDRLGYYPYIDSITGVTVNGGIPQKISLQDHLDKAKKDITFYMPVDNLGMAVIDWEEWRPTWARNWKPKDVYKNRSIELVQQQNVQLSLTEATEKAKQEFEKAGKDFLVETIKLGKLLRPNHLWGYYLFPDCYNHHYKKPGYNGSCFNVEIKRNDDLSWLWNESTALYPSIYLNTQQSPVAATLYVRNRVREAIRVSKIPDAKSPLPVFAYTRIVFTDQVLKFLSQDELVYTFGETVALGASGIVIWGTLSIMRSMKSCLLLDNYMETILNPYIINVTLAAKMCSQVLCQEQGVCIRKNWNSSDYLHLNPDNFAIQLEKGGKFTVRGKPTLEDLEQFSEKFYCSCYSTLSCKEKADVKDTDAVDVCIADGVCIDAFLKPPMETEEPQIFYNAS

SEQ ID NO: 52 - protein, 451 aa, Homo Sapiens
  mature human PH20 36-486
LNFRAPPVIPNVPFLWAWNAPSEFCLGKFDEPLDMSLFSFIGSPRINATGQGVTIFYVDRLGYYPYIDSITGVTVNGGIPQKISLQDHLDKAKKDITFYMPVDNLGMAVIDWEEWRPTWARNWKPKDVYKNRSIELVQQQNVQLSLTEATEKAKQEFEKAGKDFLVETIKLGKLLRPNHLWGYYLFPDCYNHHYKKPGYNGSCFNVEIKRNDDLSWLWNESTALYPSIYLNTQQSPVAATLYVRNRVREAIRVSKIPDAKSPLPVFAYTRIVFTDQVLKFLSQDELVYTFGETVALGASGIVIWGTLSIMRSMKSCLLLDNYMETILNPYIINVTLAAKMCSQVLCQEQGVCIRKNWNSSDYLHLNPDNFAIQLEKGGKFTVRGKPTLEDLEQFSEKFYCSCYSTLSCKEKADVKDTDAVDVCIADGVCIDAFLKPPMETEEPQIFYNASP

SEQ ID NO: 53 - protein, 452 aa, Homo Sapiens
  mature human PH20 36-487
LNFRAPPVIPNVPFLWAWNAPSEFCLGKFDEPLDMSLFSFIGSPRINATGQGVTIFYVDRLGYYPYIDSITGVTVNGGIPQKISLQDHLDKAKKDITFYMPVDNLGMAVIDWEEWRPTWARNWKPKDVYKNRSIELVQQQNVQLSLTEATEKAKQEFEKAGKDFLVETIKLGKLLRPNHLWGYYLFPDCYNHHYKKPGYNGSCFNVEIKRNDDLSWLWNESTALYPSIYLNTQQSPVAATLYVRNRVREAIRVSKIPDAKSPLPVFAYTRIVFTDQVLKFLSQDELVYTFGETVALGASGIVIWGTLSIMRSMKSCLLLDNYMETILNPYIINVTLAAKMCSQVLCQEQGVCIRKNWNSSDYLHLNPDNFAIQLEKGGKFTVRGKPTLEDLEQFSEKFYCSCYSTLSCKEKADVKDTDAVDVCIADGVCIDAFLKPPMETEEPQIFYNASPS

SEQ ID NO: 54 - protein, 453 aa, Homo Sapiens
  mature human PH20 36-488
LNFRAPPVIPNVPFLWAWNAPSEFCLGKFDEPLDMSLFSFIGSPRINATGQGVTIFYVDRLGYYPYIDSITGVTVNGGIPQKISLQDHLDKAKKDITFYMPVDNLGMAVIDWEEWRPTWARNWKPKDVYKNRSIELVQQQNVQLSLTEATEKAKQEFEKAGKDFLVETIKLGKLLRPNHLWGYYLFPDCYNHHYKKPGYNGSCFNVEIKRNDDLSWLWNESTALYPSIYLNTQQSPVAATLYVRNRVREAIRVSKIPDAKSPLPVFAYTRIVFTDQVLKFLSQDELVYTFGETVALGASGIVIWGTLSIMRSMKSCLLLDNYMETILNPYIINVTLAAKMCSQVLCQEQGVCIRKNWNSSDYLHLNPDNFAIQLEKGGKFTVRGKPTLEDLEQFSEKFYCSCYSTLSCKEKADVKDTDAVDVCIADGVCIDAFLKPPMETEEPQIFYNASPST

SEQ ID NO: 55 - protein, 454 aa, Homo Sapiens
  mature human PH20 36-489
LNFRAPPVIPNVPFLWAWNAPSEFCLGKFDEPLDMSLFSFIGSPRINATGQGVTIFYVDRLGYYPYIDSITGVTVNGGIPQKISLQDHLDKAKKDITFYMPVDNLGMAVIDWEEWRPTWARNWKPKDVYKNRSIELVQQQNVQLSLTEATEKAKQEFEKAGKDFLVETIKLGKLLRPNHLWGYYLFPDCYNHHYKKPGYNGSCFNVEIKRNDDLSWLWNESTALYPSIYLNTQQSPVAATLYVRNRVREAIRVSKIPDAKSPLPVFAYTRIVFTDQVLKFLSQDELVYTFGETVALGASGIVIWGTLSIMRSMKSCLLLDNYMETILNPYIINVTLAAKMCSQVLCQEQGVCIRKNWNSSDYLHLNPDNFAIQLEKGGKFTVRGKPTLEDLEQFSEKFYCSCYSTLSCKEKADVKDTDAVDVCIADGVCIDAFLKPPMETEEPQIFYNASPSTL

SEQ ID NO: 56 - protein, 455 aa, Homo Sapiens
  mature human PH20 36-490
LNFRAPPVIPNVPFLWAWNAPSEFCLGKFDEPLDMSLFSFIGSPRINATGQGVTIFYVDRLGYYPYIDSITGVTVNGGIPQKISLQDHLDKAKKDITFYMPVDNLGMAVIDWEEWRPTWARNWKPKDVYKNRSIELVQQQNVQLSLTEATEKAKQEFEKAGKDFLVETIKLGKLLRPNHLWGYYLFPDCYNHHYKKPGYNGSCFNVEIKRNDDLSWLWNESTALYPSIYLNTQQSPVAATLYVRNRVREAIRVSKIPDAKSPLPVFAYTRIVFTDQVLKFLSQDELVYTFGETVALGASGIVIWGTLSIMRSMKSCLLLDNYMETILNPYIINVTLAAKMCSQVLCQEQGVCIRKNWNSSDYLHLNPDNFAIQLEKGGKFTVRGKPTLEDLEQFSEKFYCSCYSTLSCKEKADVKDTDAVDVCIADGVCIDAFLKPPMETEEPQIFYNASPSTLS

SEQ ID NO: 57 - protein, 456 aa, Homo Sapiens
  mature human PH20 36-491
LNFRAPPVIPNVPFLWAWNAPSEFCLGKFDEPLDMSLFSFIGSPRINATGQGVTIFYVDRLGYYPYIDSITGVTVNGGIPQKISLQDHLDKAKKDITFYMPVDNLGMAVIDWEEWRPTWARNWKPKDVYKNRSIELVQQQNVQLSLTEATEKAKQEFEKAGKDFLVETIKLGKLLRPNHLWGYYLFPDCYNHHYKKPGYNGSCFNVEIKRNDDLSWLWNESTALYPSIYLNTQQSPVAATLYVRNRVREAIRVSKIPDAKSPLPVFAYTRIVFTDQVLKFLSQDELVYTFGETVALGASGIVIWGTLSIMRSMKSCLLLDNYMETILNPYIINVTLAAKMCSQVLCQEQGVCIRKNWNSSDYLHLNPDNFAIQLEKGGKFTVRGKPTLEDLEQFSEKFYCSCYSTLSCKEKADVKDTDAVDVCIADGVCIDAFLKPPMETEEPQIFYNASPSTLSA

SEQ ID NO: 58 - protein, 457 aa, Homo Sapiens
  mature human PH20 36-492
LNFRAPPVIPNVPFLWAWNAPSEFCLGKFDEPLDMSLFSFIGSPRINATGQGVTIFYVDRLGYYPYIDSITGVTVNGGIPQKISLQDHLDKAKKDITFYMPVDNLGMAVIDWEEWRPTWARNWKPKDVYKNRSIELVQQQNVQLSLTEATEKAKQEFEKAGKDFLVETIKLGKLLRPNHLWGYYLFPDCYNHHYKKPGYNGSCFNVEIKRNDDLSWLWNESTALYPSIYLNTQQSPVAATLYVRNRVREAIRVSKIPDAKSPLPVFAYTRIVFTDQVLKFLSQDELVYTFGETVALGASGIVIWGTLSIMRSMKSCLLLDNYMETILNPYIINVTLAAKMCSQVLCQEQGVCIRKNWNSSDYLHLNPDNFAIQLEKGGKFTVRGKPTLEDLEQFSEKFYCSCYSTLSCKEKADVKDTDAVDVCIADGVCIDAFLKPPMETEEPQIFYNASPSTLSAT

SEQ ID NO: 59 - protein, 458 aa, Homo Sapiens
  mature human PH20 36-493
LNFRAPPVIPNVPFLWAWNAPSEFCLGKFDEPLDMSLFSFIGSPRINATGQGVTIFYVDRLGYYPYIDSITGVTVNGGIPQKISLQDHLDKAKKDITFYMPVDNLGMAVIDWEEWRPTWARNWKPKDVYKNRSIELVQQQNVQLSLTEATEKAKQEFEKAGKDFLVETIKLGKLLRPNHLWGYYLFPDCYNHHYKKPGYNGSCFNVEIKRNDDLSWLWNESTALYPSIYLNTQQSPVAATLYVRNRVREAIRVSKIPDAKSPLPVFAYTRIVFTDQVLKFLSQDELVYTFGETVALGASGIVIWGTLSIMRSMKSCLLLDNYMETILNPYIINVTLAAKMCSQVLCQEQGVCIRKNWNSSDYLHLNPDNFAIQLEKGGKFTVRGKPTLEDLEQFSEKFYCSCYSTLSCKEKADVKDTDAVDVCIADGVCIDAFLKPPMETEEPQIFYNASPSTLSATM

SEQ ID NO: 60 - protein, 459 aa, Homo Sapiens
  mature human PH20 36-494
LNFRAPPVIPNVPFLWAWNAPSEFCLGKFDEPLDMSLFSFIGSPRINATGQGVTIFYVDRLGYYPYIDSITGVTVNGGIPQKISLQDHLDKAKKDITFYMPVDNLGMAVIDWEEWRPTWARNWKPKDVYKNRSIELVQQQNVQLSLTEATEKAKQEFEKAGKDFLVETIKLGKLLRPNHLWGYYLFPDCYNHHYKKPGYNGSCFNVEIKRNDDLSWLWNESTALYPSIYLNTQQSPVAATLYVRNRVREAIRVSKIPDAKSPLPVFAYTRIVFTDQVLKFLSQDELVYTFGETVALGASGIVIWGTLSIMRSMKSCLLLDNYMETILNPYIINVTLAAKMCSQVLCQEQGVCIRKNWNSSDYLHLNPDNFAIQLEKGGKFTVRGKPTLEDLEQFSEKFYCSCYSTLSCKEKADVKDTDAVDVCIADGVCIDAFLKPPMETEEPQIFYNASPSTLSATMF

SEQ ID NO: 61 - protein, 460 aa, Homo Sapiens
  mature human PH20 36-495
LNFRAPPVIPNVPFLWAWNAPSEFCLGKFDEPLDMSLFSFIGSPRINATGQGVTIFYVDRLGYYPYIDSITGVTVNGGIPQKISLQDHLDKAKKDITFYMPVDNLGMAVIDWEEWRPTWARNWKPKDVYKNRSIELVQQQNVQLSLTEATEKAKQEFEKAGKDFLVETIKLGKLLRPNHLWGYYLFPDCYNHHYKKPGYNGSCFNVEIKRNDDLSWLWNESTALYPSIYLNTQQSPVAATLYVRNRVREAIRVSKIPDAKSPLPVFAYTRIVFTDQVLKFLSQDELVYTFGETVALGASGIVIWGTLSIMRSMKSCLLLDNYMETILNPYIINVTLAAKMCSQVLCQEQGVCIRKNWNSSDYLHLNPDNFAIQLEKGGKFTVRGKPTLEDLEQFSEKFYCSCYSTLSCKEKADVKDTDAVDVCIADGVCIDAFLKPPMETEEPQIFYNASPSTLSATMFI

SEQ ID NO: 62 - protein, 461 aa, Homo sapiens
  mature human PH20 36-496
LNFRAPPVIPNVPFLWAWNAPSEFCLGKFDEPLDMSLFSFIGSPRINATGQGVTIFYVDRLGYYPYIDSITGVTVNGGIPQKISLQDHLDKAKKDITFYMPVDNLGMAVIDWEEWRPTWARNWKPKDVYKNRSIELVQQQNVQLSLTEATEKAKQEFEKAGKDFLVETIKLGKLLRPNHLWGYYLFPDCYNHHYKKPGYNGSCFNVEIKRNDDLSWLWNESTALYPSIYLNTQQSPVAATLYVRNRVREAIRVSKIPDAKSPLPVFAYTRIVFTDQVLKFLSQDELVYTFGETVALGASGIVIWGTLSIMRSMKSCLLLDNYMETILNPYIINVTLAAKMCSQVLCQEQGVCIRKNWNSSDYLHLNPDNFAIQLEKGGKFTVRGKPTLEDLEQFSEKFYCSCYSTLSCKEKADVKDTDAVDVCIADGVCIDAFLKPPMETEEPQIFYNASPSTLSATMFIV

SEQ ID NO: 63 - protein, 462 aa, Homo Sapiens
  mature human PH30 36-497
LNFRAPPVIPNVPFLWAWNAPSEFCLGKFDEPLDMSLFSFIGSPRINATGQGVTIFYVDRLGYYPYIDSITGVTVNGGIPQKISLQDHLDKAKKDITFYMPVDNLGMAVIDWEEWRPTWARNWKPKDVYKNRSIELVQQQNVQLSLTEATEKAKQEFEKAGKDFLVETIKLGKLLRPNHLWGYYLFPDCYNHHYKKPGYNGSCFNVEIKRNDDLSWLWNESTALYPSIYLNTQQSPVAATLYVRNRVREAIRVSKIPDAKSPLPVFAYTRIVFTDQVLKFLSQDELVYTFGETVALGASGIVIWGTLSIMRSMKSCLLLDNYMETILNPYIINVTLAAKMCSQVLCQEQGVCIRKNWNSSDYLHLNPDNFAIQLEKGGKFTVRGKPTLEDLEQFSEKFYCSCYSTLSCKEKADVKDTDAVDVCIADGVCIDAFLKPPMETEEPQIFYNASPSTLSATMFIVS

SEQ ID NO: 64 - protein, 463 aa, Homo sapiens
  mature human PH20 36-498
LNFRAPPVIPNVPFLWAWNAPSEFCLGKFDEPLDMSLFSFIGSPRINATGQGVTIFYVDRLGYYPYIDSITGVTVNGGIPQKISLQDHLDKAKKDITFYMPVDNLGMAVIDWEEWRPTWARNWKPKDVYKNRSIELVQQQNVQLSLTEATEKAKQEFEKAGKDFLVETIKLGKLLRPNHLWGYYLFPDCYNHHYKKPGYNGSCFNVEIKRNDDLSWLWNESTALYPSIYLNTQQSPVAATLYVRNRVREAIRVSKIPDAKSPLPVFAYTRIVFTDQVLKFLSQDELVYTFGETVALGASGIVIWGTLSIMRSMKSCLLLDNYMETILNPYIINVTLAAKMCSQVLCQEQGVCIRKNWNSSDYLHLNPDNFAIQLEKGGKFTVRGKPTLEDLEQFSEKFYCSCYSTLSCKEKADVKDTDAVDVCIADGVCIDAFLKPPMETEEPQIFYNASPSTLSATMFIVSI

SEQ ID NO: 65 - protein, 464 aa, Homo Sapiens
  mature human PH20 36-499
LNFRAPPVIPNVPFLWAWNAPSEFCLGKFDEPLDMSLFSFIGSPRINATGQGVTIFYVDRLGYYPYIDSITGVTVNGGIPQKISLQDHLDKAKKDITFYMPVDNLGMAVIDWEEWRPTWARNWKPKDVYKNRSIELVQQQNVQLSLTEATEKAKQEFEKAGKDFLVETIKLGKLLRPNHLWGYYLFPDCYNHHYKKPGYNGSCFNVEIKRNDDLSWLWNESTALYPSIYLNTQQSPVAATLYVRNRVREAIRVSKIPDAKSPLPVFAYTRIVFTDQVLKFLSQDELVYTFGETVALGASGIVIWGTLSIMRSMKSCLLLDNYMETILNPYIINVTLAAKMCSQVLCQEQGVCIRKNWNSSDYLHLNPDNFAIQLEKGGKFTVRGKPTLEDLEQFSEKFYCSCYSTLSCKEKADVKDTDAVDVCIADGVCIDAFLKPPMETEEPQIFYNASPSTLSATMFIVSIL

SEQ ID NO: 66 - protein, 465 aa, Homo Sapiens
  mature human PH20 36-500
LNFRAPPVIPNVPFLWAWNAPSEFCLGKFDEPLDMSLFSFIGSPRINATGQGVTIFYVDRLGYYPYIDSITGVTVNGGIPQKISLQDHLDKAKKDITFYMPVDNLGMAVIDWEEWRPTWARNWKPKDVYKNRSIELVQQQNVQLSLTEATEKAKQEFEKAGKDFLVETIKLGKLLRPNHLWGYYLFPDCYNHHYKKPGYNGSCFNVEIKRNDDLSWLWNESTALYPSIYLNTQQSPVAATLYVRNRVREAIRVSKIPDAKSPLPVFAYTRIVFTDQVLKFLSQDELVYTFGETVALGASGIVIWGTLSIMRSMKSCLLLDNYMETILNPYIINVTLAAKMCSQVLCQEQGVCIRKNWNSSDYLHLNPDNFAIQLEKGGKFTVRGKPTLEDLEQFSEKFYCSCYSTLSCKEKADVKDTDAVDVCIADGVCIDAFLKPPMETEEPQIFYNASPSTLSATMFIVSILF

SEQ ID NO: 67 - DNA, 1446 bp, Homo Sapiens
  DNA encoding PH20 1-482
atgggagtgctaaaattcaagcacatctttttcagaagctttgttaaatcaagtggagtatcccagatagttttcaccttccttctgattccatgttgcttgactctgaatttcagagcacctcctgttattccaaatgtgcctttcctctgggcctggaatgccccaagtgaattttgtcttggaaaatttgatgagccactagatatgagcctcttctctttcataggaagcccccgaataaacgccaccgggcaaggtgttacaatattttatgttgatagacttggctactatccttacatagattcaatcacaggagtaactgtgaatggaggaatcccccagaagatttccttacaagaccatctggacaaagctaagaaagacattacattttatatgccagtagacaatttgggaatggctgttattgactgggaagaatggagacccacttgggcaagaaactggaaacctaaagatgtttacaagaataggtctattgaattggttcagcaacaaaatgtacaacttagtctcacagaggccactgagaaagcaaaacaagaatttgaaaaggcagggaaggatttcctggtagagactataaaattgggaaaattacttcggccaaatcacttgtggggttattatctttttccggattgttacaaccatcactataagaaacccggttacaatggaagttgcttcaatgtagaaataaaaagaaatgatgatctcagctggttgtggaatgaaagcactgctctttacccatccatttatttgaacactcagcagtctcctgtagctgctacactctatgtgcgcaatcgagttcgggaagccatcagagtttccaaaatacctgatgcaaaaagtccacttccggtttttgcatatacccgcatagtttttactgatcaagttttgaaattcctttctcaagatgaacttgtgtatacatttggcgaaactgttgctctgggtgcttctggaattgtaatatggggaaccctcagtataatgcgaagtatgaaatcttgcttgctcctagacaattacatggagactatactgaatccttacataatcaacgtcacactagcagccaaaatgtgtagccaagtgctttgccaggagcaaggagtgtgtataaggaaaaactggaattcaagtgactatcttcacctcaacccagataattttgctattcaacttgagaaaggtggaaagttcacagtacgtggaaaaccgacacttgaagacctggagcaattttctgaaaaattttattgcagctgttatagcaccttgagttgtaaggagaaagctgatgtaaaagacactgatgctgttgatgtgtgtattgctgatggtgtctgtatagatgcttttctaaaacctcccatggagacagaagaacctcaaattttctac

SEQ ID NO: 68 - protein, 509 aa, Homo Sapiens [sequence omitted]

SEQ ID NO: 69 - protein, 474 aa, Homo Sapiens
  mature human PH20 Ala13 and Trp464
LNFRAPPVIPNVAFLWAWNAPSEFCLGKFDEPLDMSLFSFIGSPRINATGQGVTIFYVDRLGYYPYIDSITGVTVNGGIPQKISLQDHLDKAKKDITFYMPVDNLGMAVIDWEEWRPTWARNWKPKDVYKNRSIELVQQQNVQLSLTEATEKAKQEFEKAGKDFLVETIKLGKLLRPNHLWGYYLFPDCYNHHYKKPGYNGSCFNVEIKRNDDLSWLWNESTALYPSIYLNTQQSPVAATLYVRNRVREAIRVSKIPDAKSPLPVFAYTRIVFTDQVLKFLSQDELVYTFGETVALGASGIVIWGTLSIMRSMKSCLLLDNYMETILNPYIINVTLAAKMCSQVLCQEQGVCIRKNWNSSDYLHLNPDNFAIQLEKGGKFTVRGKPTLEDLEQFSEKFYCSCYSTLSCKEKADVKDTDAVDVCIADGVCIDAFLKPPMETEEPQIFYNASPSTLSATMFIVSIWFLIISSVASL

SEQ ID NO: 70 - protein, 509 aa, Homo sapiens
  Precursor PH20 Gln5
MGVLQFKHIFFRSFVKSSGVSQIVFTFLLIPCCLTLNFRAPPVIPNVPFLWAWNAPSEFCLGKFDEPLDMSLFSFIGSPRINATGQGVTIFYVDRLGYYPYIDSITGVTVNGGIPQKISLQDHLDKAKKDITFYMPVDNLGMAVIDWEEWRPTWARNWKPKDVYKNRSIELVQQQNVQLSLTEATEKAKQEFEKAGKDFLVETIKLGKLLRPNHLWGYYLFPDCYNHHYKKPGYNGSCFNVEIKRNDDLSWLWNESTALYPSIYLNTQQSPVAATLYVRNRVREAIRVSKIPDAKSPLPVFAYTRIVFTDQVLKFLSQDELVYTFGETVALGASGIVIWGTLSIMRSMKSCLLLDNYMETILNPYIINVTLAAKMCSQVLCQEQGVCIRKNWNSSDYLHLNPDNFAIQLEKGGKFTVRGKPTLEDLEQFSEKFYCSCYSTLSCKEKADVKDTDAVDVCIADGVCIDAFLKPPMETEEPQIFYNASPSTLSATMFIVSILFLIISSVASL

SEQ ID NO: 71 - protein, 509 aa, Homo Sapiens
  Precursor PH20 Ala47
MGVLKFKHIFFRSFVKSSGVSQIVFTFLLIPCCLTLNFRAPPVIPNAPFLWAWNAPSEFCLGKFDEPLDMSLFSFIGSPRINATGQGVTIFYVDRLGYYPYIDSITGVTVNGGIPQKISLQDHLDKAKKDITFYMPVDNLGMAVIDWEEWRPTWARNWKPKDVYKNRSIELVQQQNVQLSLTEATEKAKQEFEKAGKDFLVETIKLGKLLRPNHLWGYYLFPDCYNHHYKKPGYNGSCFNVEIKRNDDLSWLWNESTALYPSIYLNTQQSPVAATLYVRNRVREAIRVSKIPDAKSPLPVFAYTRIVFTDQVLKFLSQDELVYTFGETVALGASGIVIWGTLSIMRSMKSCLLLDNYMETILNPYIINVTLAAKMCSQVLCQEQGVCIRKNWNSSDYLHLNPDNFAIQLEKGGKFTVRGKPTLEDLEQFSEKFYCSCYSTLSCKEKADVKDTDAVDVCIADGVCIDAFLKPPMETEEPQIFYNASPSTLSATMFIVSILFLIISSVASL

SEQ ID NO: 72 - protein, 474 aa, Homo Sapiens
  mature PH20 Ala12
LNFRAPPVIPNAPFLWAWNAPSEFCLGKFDEPLDMSLFSFIGSPRINATGQGVTIFYVDRLGYYPYIDSITGVTVNGGIPQKISLQDHLDKAKKDITFYMPVDNLGMAVIDWEEWRPTWARNWKPKDVYKNRSIELVQQQNVQLSLTEATEKAKQEFEKAGKDFLVETIKLGKLLRPNHLWGYYLFPDCYNHHYKKPGYNGSCFNVEIKRNDDLSWLWNESTALYPSIYLNTQQSPVAATLYVRNRVREAIRVSKIPDAKSPLPVFAYTRIVFTDQVLKFLSQDELVYTFGETVALGASGIVIWGTLSIMRSMKSCLLLDNYMETILNPYIINVTLAAKMCSQVLCQEQGVCIRKNWNSSDYLHLNPDNFAIQLEKGGKFTVRGKPTLEDLEQFSEKFYCSCYSTLSCKEKADVKDTDAVDVCIADGVCIDAFLKPPMETEEPQIFYNASPSTLSATMFIVSILFLIISSVASL

SEQ ID NO: 73 - protein, 447 aa, Artificial Sequence
  Mature PH20 36-482 with G at a position corresponding to amino acid residue 10
LNFRAPPVIGNVPFLWAWNAPSEFCLGKFDEPLDMSLFSFIGSPRINATGQGVTIFYVDRLGYYPYIDSITGVTVNGGIPQKISLQDHLDKAKKDITFYMPVDNLGMAVIDWEEWRPTWARNWKPKDVYKNRSIELVQQQNVQLSLTEATEKAKQEFEKAGKDFLVETIKLGKLLRPNHLWGYYLFPDCYNHHYKKPGYNGSCFNVEIKRNDDLSWLWNESTALYPSIYLNTQQSPVAATLYVRNRVREAIRVSKIPDAKSPLPVFAYTRIVFTDQVLKFLSQDELVYTFGETVALGASGIVIWGTLSIMRSMKSCLLLDNYMETILNPYIINVTLAAKMCSQVLCQEQGVCIRKNWNSSDYLHLNPDNFAIQLEKGGKFTVRGKPTLEDLEQFSEKFYCSCYSTLSCKEKADVKDTDAVDVCIADGVCIDAFLKPPMETEEPQIFY

SEQ ID NO: 74 - protein, 447 aa, Artificial Sequence
  Mature PH20 36-482 with N at a position corresponding to amino acid residue 10
LNFRAPPVINNVPFLWAWNAPSEFCLGKFDEPLDMSLFSFIGSPRINATGQGVTIFYVDRLGYYPYIDSITGVTVNGGIPQKISLQDHLDKAKKDITFYMPVDNLGMAVIDWEEWRPTWARNWKPKDVYKNRSIELVQQQNVQLSLTEATEKAKQEFEKAGKDFLVETIKLGKLLRPNHLWGYYLFPDCYNHHYKKPGYNGSCFNVEIKRNDDLSWLWNESTALYPSIYLNTQQSPVAATLYVRNRVREAIRVSKIPDAKSPLPVFAYTRIVFTDQVLKFLSQDELVYTFGETVALGASGIVIWGTLSIMRSMKSCLLLDNYMETILNPYIINVTLAAKMCSQVLCQEQGVCIRKNWNSSDYLHLNPDNFAIQLEKGGKFTVRGKPTLEDLEQFSEKFYCSCYSTLSCKEKADVKDTDAVDVCIADGVCIDAFLKPPMETEEPQIFY

SEQ ID NO: 75 - protein, 447 aa, Artificial Sequence
  Mature PH20 36-482 with H at a position corresponding to amino acid residue 158
LNFRAPPVIPNVPFLWAWNAPSEFCLGKFDEPLDMSLFSFIGSPRINATGQGVTIFYVDRLGYYPYIDSITGVTVNGGIPQKISLQDHLDKAKKDITFYMPVDNLGMAVIDWEEWRPTWARNWKPKDVYKNRSIELVQQQNVQLSLTEATEKAKQEFHKAGKDFLVETIKLGKLLRPNHLWGYYLFPDCYNHHYKKPGYNGSCFNVEIKRNDDLSWLWNESTALYPSIYLNTQQSPVAATLYVRNRVREAIRVSKIPDAKSPLPVFAYTRIVFTDQVLKFLSQDELVYTFGETVALGASGIVIWGTLSIMRSMKSCLLLDNYMETILNPYIINVTLAAKMCSQVLCQEQGVCIRKNWNSSDYLHLNPDNFAIQLEKGGKFTVRGKPTLEDLEQFSEKFYCSCYSTLSCKEKADVKDTDAVDVCIADGVCIDAFLKPPMETEEPQIFY

SEQ ID NO: 76 - protein, 447 aa, Artificial Sequence
  Mature PH20 36-482 with H at a position corresponding to amino acid residue 13
LNFRAPPVIPNVHFLWAWNAPSEFCLGKFDEPLDMSLFSFIGSPRINATGQGVTIFYVDRLGYYPYIDSITGVTVNGGIPQKISLQDHLDKAKKDITFYMPVDNLGMAVIDWEEWRPTWARNWKPKDVYKNRSIELVQQQNVQLSLTEATEKAKQEFEKAGKDFLVETIKLGKLLRPNHLWGYYLFPDCYNHHYKKPGYNGSCFNVEIKRNDDLSWLWNESTALYPSIYLNTQQSPVAATLYVRNRVREAIRVSKIPDAKSPLPVFAYTRIVFTDQVLKFLSQDELVYTFGETVALGASGIVIWGTLSIMRSMKSCLLLDNYMETILNPYIINVTLAAKMCSQVLCQEQGVCIRKNWNSSDYLHLNPDNFAIQLEKGGKFTVRGKPTLEDLEQFSEKFYCSCYSTLSCKEKADVKDTDAVDVCIADGVCIDAFLKPPMETEEPQIFY

SEQ ID NO: 77 - protein, 447 aa, Artificial Sequence
  Mature PH20 36-482 with V at a position corresponding to amino acid residue 271
LNFRAPPVIPNVPFLWAWNAPSEFCLGKFDEPLDMSLFSFIGSPRINATGQGVTIFYVDRLGYYPYIDSITGVTVNGGIPQKISLQDHLDKAKKDITFYMPVDNLGMAVIDWEEWRPTWARNWKPKDVYKNRSIELVQQQNVQLSLTEATEKAKQEFEKAGKDFLVETIKLGKLLRPNHLWGYYLFPDCYNHHYKKPGYNGSCFNVEIKRNDDLSWLWNESTALYPSIYLNTQQSPVAATLYVRNRVREAIRVSKIPDAKSPLPVFAYTRVVFTDQVLKFLSQDELVYTFGETVALGASGIVIWGTLSIMRSMKSCLLLDNYMETILNPYIINVTLAAKMCSQVLCQEQGVCIRKNWNSSDYLHLNPDNFAIQLEKGGKFTVRGKPTLEDLEQFSEKFYCSCYSTLSCKEKADVKDTDAVDVCIADGVCIDAFLKPPMETEEPQIFY

SEQ ID NO: 78 - protein, 447 aa, Artificial Sequence
  Mature PH20 36-482 with S at a position corresponding to amino acid residue 93
LNFRAPPVIPNVPFLWAWNAPSEFCLGKFDEPLDMSLFSFIGSPRINATGQGVTIFYVDRLGYYPYIDSITGVTVNGGIPQKISLQDHLDKASKDITFYMPVDNLGMAVIDWEEWRPTWARNWKPKDVYKNRSIELVQQQNVQLSLTEATEKAKQEFEKAGKDFLVETIKLGKLLRPNHLWGYYLFPDCYNHHYKKPGYNGSCFNVEIKRNDDLSWLWNESTALYPSIYLNTQQSPVAATLYVRNRVREAIRVSKIPDAKSPLPVFAYTRIVFTDQVLKFLSQDELVYTFGETVALGASGIVIWGTLSIMRSMKSCLLLDNYMETILNPYIINVTLAAKMCSQVLCQEQGVCIRKNWNSSDYLHLNPDNFAIQLEKGGKFTVRGKPTLEDLEQFSEKFYCSCYSTLSCKEKADVKDTDAVDVCIADGVCIDAFLKPPMETEEPQIFY

SEQ ID NO: 79 - protein, 447 aa, Artificial Sequence
  Mature PH20 36-482 with P at a position corresponding to amino acid residue 26
LNFRAPPVIPNVPFLWAWNAPSEFCPGKFDEPLDMSLFSFIGSPRINATGQGVTIFYVDRLGYYPYIDSITGVTVNGGIPQKISLQDHLDKAKKDITFYMPVDNLGMAVIDWEEWRPTWARNWKPKDVYKNRSIELVQQQNVQLSLTEATEKAKQEFEKAGKDFLVETIKLGKLLRPNHLWGYYLFPDCYNHHYKKPGYNGSCFNVEIKRNDDLSWLWNESTALYPSIYLNTQQSPVAATLYVRNRVREAIRVSKIPDAKSPLPVFAYTRIVFTDQVLKFLSQDELVYTFGETVALGASGIVIWGTLSIMRSMKSCLLLDNYMETILNPYIINVTLAAKMCSQVLCQEQGVCIRKNWNSSDYLHLNPDNFAIQLEKGGKFTVRGKPTLEDLEQFSEKFYCSCYSTLSCKEKADVKDTDAVDVCIADGVCIDAFLKPPMETEEPQIFY

SEQ ID NO: 80 - protein, 447 aa, Artificial Sequence
  Mature PH20 36-482 with N at a position corresponding to amino acid residue 159
LNFRAPPVIPNVPFLWAWNAPSEFCLGKFDEPLDMSLFSFIGSPRINATGQGVTIFYVDRLGYYPYIDSITGVTVNGGIPQKISLQDHLDKAKKDITFYMPVDNLGMAVIDWEEWRPTWARNWKPKDVYKNRSIELVQQQNVQLSLTEATEKAKQEFENAGKDFLVETIKLGKLLRPNHLWGYYLFPDCYNHHYKKPGYNGSCFNVEIKRNDDLSWLWNESTALYPSIYLNTQQSPVAATLYVRNRVREAIRVSKIPDAKSPLPVFAYTRIVFTDQVLKFLSQDELVYTFGETVALGASGIVIWGTLSIMRSMKSCLLLDNYMETILNPYIINVTLAAKMCSQVLCQEQGVCIRKNWNSSDYLHLNPDNFAIQLEKGGKFTVRGKPTLEDLEQFSEKFYCSCYSTLSCKEKADVKDTDAVDVCIADGVCIDAFLKPPMETEEPQIFY

SEQ ID NO: 81 - protein, 447 aa, Artificial Sequence
  Mature PH20 36-482 with R at a position corresponding to amino acid residue 208
LNFRAPPVIPNVPFLWAWNAPSEFCLGKFDEPLDMSLFSFIGSPRINATGQGVTIFYVDRLGYYPYIDSITGVTVNGGIPQKISLQDHLDKAKKDITFYMPVDNLGMAVIDWEEWRPTWARNWKPKDVYKNRSIELVQQQNVQLSLTEATEKAKQEFEKAGKDFLVETIKLGKLLRPNHLWGYYLFPDCYNHHYKKPGYNGSCFNVERKRNDDLSWLWNESTALYPSIYLNTQQSPVAATLYVRNRVREAIRVSKIPDAKSPLPVFAYTRIVFTDQVLKFLSQDELVYTFGETVALGASGIVIWGTLSIMRSMKSCLLLDNYMETILNPYIINVTLAAKMCSQVLCQEQGVCIRKNWNSSDYLHLNPDNFAIQLEKGGKFTVRGKPTLEDLEQFSEKFYCSCYSTLSCKEKADVKDTDAVDVCIADGVCIDAFLKPPMETEEPQIFY

SEQ ID NO: 82 - protein, 447 aa, Artificial Sequence
  Mature PH20 36-482 with V at a position corresponding to amino acid residue 26
LNFRAPPVIPNVPFLWAWNAPSEFCVGKFDEPLDMSLFSFIGSPRINATGQGVTIFYVDRLGYYPYIDSITGVTVNGGIPQKISLQDHLDKAKKDITFYMPVDNLGMAVIDWEEWRPTWARNWKPKDVYKNRSIELVQQQNVQLSLTEATEKAKQEFEKAGKDFLVETIKLGKLLRPNHLWGYYLFPDCYNHHYKKPGYNGSCFNVEIKRNDDLSWLWNESTALYPSIYLNTQQSPVAATLYVRNRVREAIRVSKIPDAKSPLPVFAYTRIVFTDQVLKFLSQDELVYTFGETVALGASGIVIWGTLSIMRSMKSCLLLDNYMETILNPYIINVTLAAKMCSQVLCQEQGVCIRKNWNSSDYLHLNPDNFAIQLEKGGKFTVRGKPTLEDLEQFSEKFYCSCYSTLSCKEKADVKDTDAVDVCIADGVCIDAFLKPPMETEEPQIFY

SEQ ID NO: 83 - protein, 447 aa, Artificial Sequence
  Mature PH20 36-482 with W at a position corresponding to amino acid residue 26
LNFRAPPVIPNVPFLWAWNAPSEFCWGKFDEPLDMSLFSFIGSPRINATGQGVTIFYVDRLGYYPYIDSITGVTVNGGIPQKISLQDHLDKAKKDITFYMPVDNLGMAVIDWEEWRPTWARNWKPKDVYKNRSIELVQQQNVQLSLTEATEKAKQEFEKAGKDFLVETIKLGKLLRPNHLWGYYLFPDCYNHHYKKPGYNGSCFNVEIKRNDDLSWLWNESTALYPSIYLNTQQSPVAATLYVRNRVREAIRVSKIPDAKSPLPVFAYTRIVFTDQVLKFLSQDELVYTFGETVALGASGIVIWGTLSIMRSMKSCLLLDNYMETILNPYIINVTLAAKMCSQVLCQEQGVCIRKNWNSSDYLHLNPDNFAIQLEKGGKFTVRGKPTLEDLEQFSEKFYCSCYSTLSCKEKADVKDTDAVDVCIADGVCIDAFLKPPMETEEPQIFY

SEQ ID NO: 84 - protein, 447 aa, Artificial Sequence
  Mature PH20 36-482 with Y at a position corresponding to amino acid residue 26
LNFRAPPVIPNVPFLWAWNAPSEFCYGKFDEPLDMSLFSFIGSPRINATGQGVTIFYVDRLGYYPYIDSITGVTVNGGIPQKISLQDHLDKAKKDITFYMPVDNLGMAVIDWEEWRPTWARNWKPKDVYKNRSIELVQQQNVQLSLTEATEKAKQEFEKAGKDFLVETIKLGKLLRPNHLWGYYLFPDCYNHHYKKPGYNGSCFNVEIKRNDDLSWLWNESTALYPSIYLNTQQSPVAATLYVRNRVREAIRVSKIPDAKSPLPVFAYTRIVFTDQVLKFLSQDELVYTFGETVALGASGIVIWGTLSIMRSMKSCLLLDNYMETILNPYIINVTLAAKMCSQVLCQEQGVCIRKNWNSSDYLHLNPDNFAIQLEKGGKFTVRGKPTLEDLEQFSEKFYCSCYSTLSCKEKADVKDTDAVDVCIADGVCIDAFLKPPMETEEPQIFY

SEQ ID NO: 85 - protein, 447 aa, Artificial Sequence
  Mature PH20 36-482 with S at a position corresponding to amino acid residue 159
LNFRAPPVIPNVPFLWAWNAPSEFCLGKFDEPLDMSLFSFIGSPRINATGQGVTIFYVDRLGYYPYIDSITGVTVNGGIPQKISLQDHLDKAKKDITFYMPVDNLGMAVIDWEEWRPTWARNWKPKDVYKNRSIELVQQQNVQLSLTEATEKAKQEFESAGKDFLVETIKLGKLLRPNHLWGYYLFPDCYNHHYKKPGYNGSCFNVEIKRNDDLSWLWNESTALYPSIYLNTQQSPVAATLYVRNRVREAIRVSKIPDAKSPLPVFAYTRIVFTDQVLKFLSQDELVYTFGETVALGASGIVIWGTLSIMRSMKSCLLLDNYMETILNPYIINVTLAAKMCSQVLCQEQGVCIRKNWNSSDYLHLNPDNFAIQLEKGGKFTVRGKPTLEDLEQFSEKFYCSCYSTLSCKEKADVKDTDAVDVCIADGVCIDAFLKPPMETEEPQIFY

SEQ ID NO: 86 - protein, 447 aa, Artificial Sequence
  Mature PH20 36-482 with G at a position corresponding to amino acid residue 447
LNFRAPPVIPNVPFLWAWNAPSEFCLGKFDEPLDMSLFSFIGSPRINATGQGVTIFYVDRLGYYPYIDSITGVTVNGGIPQKISLQDHLDKAKKDITFYMPVDNLGMAVIDWEEWRPTWARNWKPKDVYKNRSIELVQQQNVQLSLTEATEKAKQEFEKAGKDFLVETIKLGKLLRPNHLWGYYLFPDCYNHHYKKPGYNGSCFNVEIKRNDDLSWLWNESTALYPSIYLNTQQSPVAATLYVRNRVREAIRVSKIPDAKSPLPVFAYTRIVFTDQVLKFLSQDELVYTFGETVALGASGIVIWGTLSIMRSMKSCLLLDNYMETILNPYIINVTLAAKMCSQVLCQEQGVCIRKNWNSSDYLHLNPDNFAIQLEKGGKFTVRGKPTLEDLEQFSEKFYCSCYSTLSCKEKADVKDTDAVDVCIADGVCIDAFLKPPMETEEPQIFG

SEQ ID NO: 87 - protein, 447 aa, Artificial Sequence
  Mature PH20 36-482 with L at a position corresponding to amino acid residue 28
LNFRAPPVIPNVPFLWAWNAPSEFCLGLFDEPLDMSLFSFIGSPRINATGQGVTIFYVDRLGYYPYIDSITGVTVNGGIPQKISLQDHLDKAKKDITFYMPVDNLGMAVIDWEEWRPTWARNWKPKDVYKNRSIELVQQQNVQLSLTEATEKAKQEFEKAGKDFLVETIKLGKLLRPNHLWGYYLFPDCYNHHYKKPGYNGSCFNVEIKRNDDLSWLWNESTALYPSIYLNTQQSPVAATLYVRNRVREAIRVSKIPDAKSPLPVFAYTRIVFTDQVLKFLSQDELVYTFGETVALGASGIVIWGTLSIMRSMKSCLLLDNYMETILNPYIINVTLAAKMCSQVLCQEQGVCIRKNWNSSDYLHLNPDNFAIQLEKGGKFTVRGKPTLEDLEQFSEKFYCSCYSTLSCKEKADVKDTDAVDVCIADGVCIDAFLKPPMETEEPQIFY

SEQ ID NO: 88 - protein, 447 aa, Artificial Sequence
  Mature PH20 36-482 with E at a position corresponding to amino acid residue 29
LNFRAPPVIPNVPFLWAWNAPSEFCLGKEDEPLDMSLFSFIGSPRINATGQGVTIFYVDRLGYYPYIDSITGVTVNGGIPQKISLQDHLDKAKKDITFYMPVDNLGMAVIDWEEWRPTWARNWKPKDVYKNRSIELVQQQNVQLSLTEATEKAKQEFEKAGKDFLVETIKLGKLLRPNHLWGYYLFPDCYNHHYKKPGYNGSCFNVEIKRNDDLSWLWNESTALYPSIYLNTQQSPVAATLYVRNRVREAIRVSKIPDAKSPLPVFAYTRIVFTDQVLKFLSQDELVYTFGETVALGASGIVIWGTLSIMRSMKSCLLLDNYMETILNPYIINVTLAAKMCSQVLCQEQGVCIRKNWNSSDYLHLNPDNFAIQLEKGGKFTVRGKPTLEDLEQFSEKFYCSCYSTLSCKEKADVKDTDAVDVCIADGVCIDAFLKPPMETEEPQIFY

SEQ ID NO: 89 - protein, 447 aa, Artificial Sequence
  Mature PH20 36-482 with W at a position corresponding to amino acid residue 90
LNFRAPPVIPNVPFLWAWNAPSEFCLGKFDEPLDMSLFSFIGSPRINATGQGVTIFYVDRLGYYPYIDSITGVTVNGGIPQKISLQDHLWKAKKDITFYMPVDNLGMAVIDWEEWRPTWARNWKPKDVYKNRSIELVQQQNVQLSLTEATEKAKQEFEKAGKDFLVETIKLGKLLRPNHLWGYYLFPDCYNHHYKKPGYNGSCFNVEIKRNDDLSWLWNESTALYPSIYLNTQQSPVAATLYVRNRVREAIRVSKIPDAKSPLPVFAYTRIVFTDQVLKFLSQDELVYTFGETVALGASGIVIWGTLSIMRSMKSCLLLDNYMETILNPYIINVTLAAKMCSQVLCQEQGVCIRKNWNSSDYLHLNPDNFAIQLEKGGKFTVRGKPTLEDLEQFSEKFYCSCYSTLSCKEKADVKDTDAVDVCIADGVCIDAFLKPPMETEEPQIFY

SEQ ID NO: 90 - protein, 447 aa, Artificial Sequence
  Mature PH20 36-482 with L at a position corresponding to amino acid residue 29
LNFRAPPVIPNVPFLWAWNAPSEFCLGKLDEPLDMSLFSFIGSPRINATGQGVTIFYVDRLGYYPYIDSITGVTVNGGIPQKISLQDHLDKAKKDITFYMPVDNLGMAVIDWEEWRPTWARNWKPKDVYKNRSIELVQQQNVQLSLTEATEKAKQEFEKAGKDFLVETIKLGKLLRPNHLWGYYLFPDCYNHHYKKPGYNGSCFNVEIKRNDDLSWLWNESTALYPSIYLNTQQSPVAATLYVRNRVREAIRVSKIPDAKSPLPVFAYTRIVFTDQVLKFLSQDELVYTFGETVALGASGIVIWGTLSIMRSMKSCLLLDNYMETILNPYIINVTLAAKMCSQVLCQEQGVCIRKNWNSSDYLHLNPDNFAIQLEKGGKFTVRGKPTLEDLEQFSEKFYCSCYSTLSCKEKADVKDTDAVDVCIADGVCIDAFLKPPMETEEPQIFY

SEQ ID NO: 91 - protein, 447 aa, Artificial Sequence
  Mature PH20 36-482 with L at a position corresponding to amino acid residue 155
LNFRAPPVIPNVPFLWAWNAPSEFCLGKFDEPLDMSLFSFIGSPRINATGQGVTIFYVDRLGYYPYIDSITGVTVNGGIPQKISLQDHLDKAKKDITFYMPVDNLGMAVIDWEEWRPTWARNWKPKDVYKNRSIELVQQQNVQLSLTEATEKAKLEFEKAGKDFLVETIKLGKLLRPNHLWGYYLFPDCYNHHYKKPGYNGSCFNVEIKRNDDLSWLWNESTALYPSIYLNTQQSPVAATLYVRNRVREAIRVSKIPDAKSPLPVFAYTRIVFTDQVLKFLSQDELVYTFGETVALGASGIVIWGTLSIMRSMKSCLLLDNYMETILNPYIINVTLAAKMCSQVLCQEQGVCIRKNWNSSDYLHLNPDNFAIQLEKGGKFTVRGKPTLEDLEQFSEKFYCSCYSTLSCKEKADVKDTDAVDVCIADGVCIDAFLKPPMETEEPQIFY

SEQ ID NO: 92 - protein, 447 aa, Artificial Sequence
  Mature PH20 36-482 with W at a position corresponding to amino acid residue 29
LNFRAPPVIPNVPFLWAWNAPSEFCLGKWDEPLDMSLFSFIGSPRINATGQGVTIFYVDRLGYYPYIDSITGVTVNGGIPQKISLQDHLDKAKKDITFYMPVDNLGMAVIDWEEWRPTWARNWKPKDVYKNRSIELVQQQNVQLSLTEATEKAKQEFEKAGKDFLVETIKLGKLLRPNHLWGYYLFPDCYNHHYKKPGYNGSCFNVEIKRNDDLSWLWNESTALYPSIYLNTQQSPVAATLYVRNRVREAIRVSKIPDAKSPLPVFAYTRIVFTDQVLKFLSQDELVYTFGETVALGASGIVIWGTLSIMRSMKSCLLLDNYMETILNPYIINVTLAAKMCSQVLCQEQGVCIRKNWNSSDYLHLNPDNFAIQLEKGGKFTVRGKPTLEDLEQFSEKFYCSCYSTLSCKEKADVKDTDAVDVCIADGVCIDAFLKPPMETEEPQIFY

SEQ ID NO: 93 - protein, 447 aa, Artificial Sequence
  Mature PH20 36-482 with F at a position corresponding to amino acid residue 155
LNFRAPPVIPNVPFLWAWNAPSEFCLGKFDEPLDMSLFSFIGSPRINATGQGVTIFYVDRLGYYPYIDSITGVTVNGGIPQKISLQDHLDKAKKDITFYMPVDNLGMAVIDWEEWRPTWARNWKPKDVYKNRSIELVQQQNVQLSLTEATEKAKFEFEKAGKDFLVETIKLGKLLRPNHLWGYYLFPDCYNHHYKKPGYNGSCFNVEIKRNDDLSWLWNESTALYPSIYLNTQQSPVAATLYVRNRVREAIRVSKIPDAKSPLPVFAYTRIVFTDQVLKFLSQDELVYTFGETVALGASGIVIWGTLSIMRSMKSCLLLDNYMETILNPYIINVTLAAKMCSQVLCQEQGVCIRKNWNSSDYLHLNPDNFAIQLEKGGKFTVRGKPTLEDLEQFSEKFYCSCYSTLSCKEKADVKDTDAVDVCIADGVCIDAFLKPPMETEEPQIFY

SEQ ID NO: 94 - protein, 447 aa, Artificial Sequence
  Mature PH20 36-482 with R at a position corresponding to amino acid residue 30
LNFRAPPVIPNVPFLWAWNAPSEFCLGKFREPLDMSLFSFIGSPRINATGQGVTIFYVDRLGYYPYIDSITGVTVNGGIPQKISLQDHLDKAKKDITFYMPVDNLGMAVIDWEEWRPTWARNWKPKDVYKNRSIELVQQQNVQLSLTEATEKAKQEFEKAGKDFLVETIKLGKLLRPNHLWGYYLFPDCYNHHYKKPGYNGSCFNVEIKRNDDLSWLWNESTALYPSIYLNTQQSPVAATLYVRNRVREAIRVSKIPDAKSPLPVFAYTRIVFTDQVLKFLSQDELVYTFGETVALGASGIVIWGTLSIMRSMKSCLLLDNYMETILNPYIINVTLAAKMCSQVLCQEQGVCIRKNWNSSDYLHLNPDNFAIQLEKGGKFTVRGKPTLEDLEQFSEKFYCSCYSTLSCKEKADVKDTDAVDVCIADGVCIDAFLKPPMETEEPQIFY

SEQ ID NO: 95 - protein, 447 aa, Artificial Sequence
  Mature PH20 36-482 with C at a position corresponding to amino acid residue 31
LNFRAPPVIPNVPFLWAWNAPSEFCLGKFDCPLDMSLFSFIGSPRINATGQGVTIFYVDRLGYYPYIDSITGVTVNGGIPQKISLQDHLDKAKKDITFYMPVDNLGMAVIDWEEWRPTWARNWKPKDVYKNRSIELVQQQNVQLSLTEATEKAKQEFEKAGKDFLVETIKLGKLLRPNHLWGYYLFPDCYNHHYKKPGYNGSCFNVEIKRNDDLSWLWNESTALYPSIYLNTQQSPVAATLYVRNRVREAIRVSKIPDAKSPLPVFAYTRIVFTDQVLKFLSQDELVYTFGETVALGASGIVIWGTLSIMRSMKSCLLLDNYMETILNPYIINVTLAAKMCSQVLCQEQGVCIRKNWNSSDYLHLNPDNFAIQLEKGGKFTVRGKPTLEDLEQFSEKFYCSCYSTLSCKEKADVKDTDAVDVCIADGVCIDAFLKPPMETEEPQIFY

SEQ ID NO: 96 - protein, 447 aa, Artificial Sequence
  Mature PH20 36-482 with Q at a position corresponding to amino acid residue 284
LNFRAPPVIPNVPFLWAWNAPSEFCLGKFDEPLDMSLFSFIGSPRINATGQGVTIFYVDRLGYYPYIDSITGVTVNGGIPQKISLQDHLDKAKKDITFYMPVDNLGMAVIDWEEWRPTWARNWKPKDVYKNRSIELVQQQNVQLSLTEATEKAKQEFEKAGKDFLVETIKLGKLLRPNHLWGYYLFPDCYNHHYKKPGYNGSCFNVEIKRNDDLSWLWNESTALYPSIYLNTQQSPVAATLYVRNRVREAIRVSKIPDAKSPLPVFAYTRIVFTDQVLKFLSQQELVYTFGETVALGASGIVIWGTLSIMRSMKSCLLLDNYMETILNPYIINVTLAAKMCSQVLCQEQGVCIRKNWNSSDYLHLNPDNFAIQLEKGGKFTVRGKPTLEDLEQFSEKFYCSCYSTLSCKEKADVKDTDAVDVCIADGVCIDAFLKPPMETEEPQIFY

SEQ ID NO: 97 - protein, 447 aa, Artificial Sequence
  Mature PH20 36-482 with A at a position corresponding to amino acid residue 342
LNFRAPPVIPNVPFLWAWNAPSEFCLGKFDEPLDMSLFSFIGSPRINATGQGVTIFYVDRLGYYPYIDSITGVTVNGGIPQKISLQDHLDKAKKDITFYMPVDNLGMAVIDWEEWRPTWARNWKPKDVYKNRSIELVQQQNVQLSLTEATEKAKQEFEKAGKDFLVETIKLGKLLRPNHLWGYYLFPDCYNHHYKKPGYNGSCFNVEIKRNDDLSWLWNESTALYPSIYLNTQQSPVAATLYVRNRVREAIRVSKIPDAKSPLPVFAYTRIVFTDQVLKFLSQDELVYTFGETVALGASGIVIWGTLSIMRSMKSCLLLDNYMETILNPYIINVTLAAKMCAQVLCQEQGVCIRKNWNSSDYLHLNPDNFAIQLEKGGKFTVRGKPTLEDLEQFSEKFYCSCYSTLSCKEKADVKDTDAVDVCIADGVCIDAFLKPPMETEEPQIFY

SEQ ID NO: 98 - protein, 447 aa, Artificial Sequence
  Mature PH20 36-482 with L at a position corresponding to amino acid residue 205
LNFRAPPVIPNVPFLWAWNAPSEFCLGKFDEPLDMSLFSFIGSPRINATGQGVTIFYVDRLGYYPYIDSITGVTVNGGIPQKISLQDHLDKAKKDITFYMPVDNLGMAVIDWEEWRPTWARNWKPKDVYKNRSIELVQQQNVQLSLTEATEKAKQEFEKAGKDFLVETIKLGKLLRPNHLWGYYLFPDCYNHHYKKPGYNGSCFLVEIKRNDDLSWLWNESTALYPSIYLNTQQSPVAATLYVRNRVREAIRVSKIPDAKSPLPVFAYTRIVFTDQVLKFLSQDELVYTFGETVALGASGIVIWGTLSIMRSMKSCLLLDNYMETILNPYIINVTLAAKMCSQVLCQEQGVCIRKNWNSSDYLHLNPDNFAIQLEKGGKFTVRGKPTLEDLEQFSEKFYCSCYSTLSCKEKADVKDTDAVDVCIADGVCIDAFLKPPMETEEPQIFY

SEQ ID NO: 99 - protein, 447 aa, Artificial Sequence
  Mature PH20 36-482 with S at a position corresponding to amino acid residue 32
LNFRAPPVIPNVPFLWAWNAPSEFCLGKFDESLDMSLFSFIGSPRINATGQGVTIFYVDRLGYYPYIDSITGVTVNGGIPQKISLQDHLDKAKKDITFYMPVDNLGMAVIDWEEWRPTWARNWKPKDVYKNRSIELVQQQNVQLSLTEATEKAKQEFEKAGKDFLVETIKLGKLLRPNHLWGYYLFPDCYNHHYKKPGYNGSCFNVEIKRNDDLSWLWNESTALYPSIYLNTQQSPVAATLYVRNRVREAIRVSKIPDAKSPLPVFAYTRIVFTDQVLKFLSQDELVYTFGETVALGASGIVIWGTLSIMRSMKSCLLLDNYMETILNPYIINVTLAAKMCSQVLCQEQGVCIRKNWNSSDYLHLNPDNFAIQLEKGGKFTVRGKPTLEDLEQFSEKFYCSCYSTLSCKEKADVKDTDAVDVCIADGVCIDAFLKPPMETEEPQIFY

SEQ ID NO: 100 - protein, 447 aa, Artificial Sequence
  Mature PH20 36-482 with V at a position corresponding to amino acid residue 32
LNFRAPPVIPNVPFLWAWNAPSEFCLGKFDEVLDMSLFSFIGSPRINATGQGVTIFYVDRLGYYPYIDSITGVTVNGGIPQKISLQDHLDKAKKDITFYMPVDNLGMAVIDWEEWRPTWARNWKPKDVYKNRSIELVQQQNVQLSLTEATEKAKQEFEKAGKDFLVETIKLGKLLRPNHLWGYYLFPDCYNHHYKKPGYNGSCFNVEIKRNDDLSWLWNESTALYPSIYLNTQQSPVAATLYVRNRVREAIRVSKIPDAKSPLPVFAYTRIVFTDQVLKFLSQDELVYTFGETVALGASGIVIWGTLSIMRSMKSCLLLDNYMETILNPYIINVTLAAKMCSQVLCQEQGVCIRKNWNSSDYLHLNPDNFAIQLEKGGKFTVRGKPTLEDLEQFSEKFYCSCYSTLSCKEKADVKDTDAVDVCIADGVCIDAFLKPPMETEEPQIFY

SEQ ID NO: 101 - protein, 447 aa, Artificial Sequence
  Mature PH20 36-482 with L at a position corresponding to amino acid residue 162
LNFRAPPVIPNVPFLWAWNAPSEFCLGKFDEPLDMSLFSFIGSPRINATGQGVTIFYVDRLGYYPYIDSITGVTVNGGIPQKISLQDHLDKAKKDITFYMPVDNLGMAVIDWEEWRPTWARNWKPKDVYKNRSIELVQQQNVQLSLTEATEKAKQEFEKAGLDFLVETIKLGKLLRPNHLWGYYLFPDCYNHHYKKPGYNGSCFNVEIKRNDDLSWLWNESTALYPSIYLNTQQSPVAATLYVRNRVREAIRVSKIPDAKSPLPVFAYTRIVFTDQVLKFLSQDELVYTFGETVALGASGIVIWGTLSIMRSMKSCLLLDNYMETILNPYIINVTLAAKMCSQVLCQEQGVCIRKNWNSSDYLHLNPDNFAIQLEKGGKFTVRGKPTLEDLEQFSEKFYCSCYSTLSCKEKADVKDTDAVDVCIADGVCIDAFLKPPMETEEPQIFY

SEQ ID NO: 102 - protein, 447 aa, Artificial Sequence
  Mature PH20 36-482 with E at a position corresponding to amino acid residue 93
LNFRAPPVIPNVPFLWAWNAPSEFCLGKFDEPLDMSLFSFIGSPRINATGQGVTIFYVDRLGYYPYIDSITGVTVNGGIPQKISLQDHLDKAEKDITFYMPVDNLGMAVIDWEEWRPTWARNWKPKDVYKNRSIELVQQQNVQLSLTEATEKAKQEFEKAGKDFLVETIKLGKLLRPNHLWGYYLFPDCYNHHYKKPGYNGSCFNVEIKRNDDLSWLWNESTALYPSIYLNTQQSPVAATLYVRNRVREAIRVSKIPDAKSPLPVFAYTRIVFTDQVLKFLSQDELVYTFGETVALGASGIVIWGTLSIMRSMKSCLLLDNYMETILNPYIINVTLAAKMCSQVLCQEQGVCIRKNWNSSDYLHLNPDNFAIQLEKGGKFTVRGKPTLEDLEQFSEKFYCSCYSTLSCKEKADVKDTDAVDVCIADGVCIDAFLKPPMETEEPQIFY

SEQ ID NO: 103 - protein, 447 aa, Artificial Sequence
  Mature PH20 36-482 with G at a position corresponding to amino acid residue 31
LNFRAPPVIPNVPFLWAWNAPSEFCLGKFDGPLDMSLFSFIGSPRINATGQGVTIFYVDRLGYYPYIDSITGVTVNGGIPQKISLQDHLDKAKKDITFYMPVDNLGMAVIDWEEWRPTWARNWKPKDVYKNRSIELVQQQNVQLSLTEATEKAKQEFEKAGKDFLVETIKLGKLLRPNHLWGYYLFPDCYNHHYKKPGYNGSCFNVEIKRNDDLSWLWNESTALYPSIYLNTQQSPVAATLYVRNRVREAIRVSKIPDAKSPLPVFAYTRIVFTDQVLKFLSQDELVYTFGETVALGASGIVIWGTLSIMRSMKSCLLLDNYMETILNPYIINVTLAAKMCSQVLCQEQGVCIRKNWNSSDYLHLNPDNFAIQLEKGGKFTVRGKPTLEDLEQFSEKFYCSCYSTLSCKEKADVKDTDAVDVCIADGVCIDAFLKPPMETEEPQIFY

SEQ ID NO: 104 - protein, 447 aa, Artificial Sequence
  Mature PH20 36-482 with P at a position corresponding to amino acid residue 204
LNFRAPPVIPNVPFLWAWNAPSEFCLGKFDEPLDMSLFSFIGSPRINATGQGVTIFYVDRLGYYPYIDSITGVTVNGGIPQKISLQDHLDKAKKDITFYMPVDNLGMAVIDWEEWRPTWARNWKPKDVYKNRSIELVQQQNVQLSLTEATEKAKQEFEKAGKDFLVETIKLGKLLRPNHLWGYYLFPDCYNHHYKKPGYNGSCPNVEIKRNDDLSWLWNESTALYPSIYLNTQQSPVAATLYVRNRVREAIRVSKIPDAKSPLPVFAYTRIVFTDQVLKFLSQDELVYTFGETVALGASGIVIWGTLSIMRSMKSCLLLDNYMETILNPYIINVTLAAKMCSQVLCQEQGVCIRKNWNSSDYLHLNPDNFAIQLEKGGKFTVRGKPTLEDLEQFSEKFYCSCYSTLSCKEKADVKDTDAVDVCIADGVCIDAFLKPPMETEEPQIFY

SEQ ID NO: 105 - protein, 447 aa, Artificial Sequence
  Mature PH20 36-482 with V at a position corresponding to amino acid residue 15
LNFRAPPVIPNVPFVWAWNAPSEFCLGKFDEPLDMSLFSFIGSPRINATGQGVTIFYVDRLGYYPYIDSITGVTVNGGIPQKISLQDHLDKAKKDITFYMPVDNLGMAVIDWEEWRPTWARNWKPKDVYKNRSIELVQQQNVQLSLTEATEKAKQEFEKAGKDFLVETIKLGKLLRPNHLWGYYLFPDCYNHHYKKPGYNGSCFNVEIKRNDDLSWLWNESTALYPSIYLNTQQSPVAATLYVRNRVREAIRVSKIPDAKSPLPVFAYTRIVFTDQVLKFLSQDELVYTFGETVALGASGIVIWGTLSIMRSMKSCLLLDNYMETILNPYIINVTLAAKMCSQVLCQEQGVCIRKNWNSSDYLHLNPDNFAIQLEKGGKFTVRGKPTLEDLEQFSEKFYCSCYSTLSCKEKADVKDTDAVDVCIADGVCIDAFLKPPMETEEPQIFY

SEQ ID NO: 106 - protein, 447 aa, Artificial Sequence
  Mature PH20 36-482 with M at a position corresponding to amino acid residue 152
LNFRAPPVIPNVPFLWAWNAPSEFCLGKFDEPLDMSLFSFIGSPRINATGQGVTIFYVDRLGYYPYIDSITGVTVNGGIPQKISLQDHLDKAKKDITFYMPVDNLGMAVIDWEEWRPTWARNWKPKDVYKNRSIELVQQQNVQLSLTEATEMAKQEFEKAGKDFLVETIKLGKLLRPNHLWGYYLFPDCYNHHYKKPGYNGSCFNVEIKRNDDLSWLWNESTALYPSIYLNTQQSPVAATLYVRNRVREAIRVSKIPDAKSPLPVFAYTRIVFTDQVLKFLSQDELVYTFGETVALGASGIVIWGTLSIMRSMKSCLLLDNYMETILNPYIINVTLAAKMCSQVLCQEQGVCIRKNWNSSDYLHLNPDNFAIQLEKGGKFTVRGKPTLEDLEQFSEKFYCSCYSTLSCKEKADVKDTDAVDVCIADGVCIDAFLKPPMETEEPQIFY

SEQ ID NO: 107 - protein, 447 aa, Artificial Sequence
  Mature PH20 36-482 with T at a position corresponding to amino acid residue 152
LNFRAPPVIPNVPFLWAWNAPSEFCLGKFDEPLDMSLFSFIGSPRINATGQGVTIFYVDRLGYYPYIDSITGVTVNGGIPQKISLQDHLDKAKKDITFYMPVDNLGMAVIDWEEWRPTWARNWKPKDVYKNRSIELVQQQNVQLSLTEATETAKQEFEKAGKDFLVETIKLGKLLRPNHLWGYYLFPDCYNHHYKKPGYNGSCFNVEIKRNDDLSWLWNESTALYPSIYLNTQQSPVAATLYVRNRVREAIRVSKIPDAKSPLPVFAYTRIVFTDQVLKFLSQDELVYTFGETVALGASGIVIWGTLSIMRSMKSCLLLDNYMETILNPYIINVTLAAKMCSQVLCQEQGVCIRKNWNSSDYLHLNPDNFAIQLEKGGKFTVRGKPTLEDLEQFSEKFYCSCYSTLSCKEKADVKDTDAVDVCIADGVCIDAFLKPPMETEEPQIFY

SEQ ID NO: 108 - protein, 447 aa, Artificial Sequence
  Mature PH20 36-482 with V at a position corresponding to amino acid residue 139
LNFRAPPVIPNVPFLWAWNAPSEFCLGKFDEPLDMSLFSFIGSPRINATGQGVTIFYVDRLGYYPYIDSITGVTVNGGIPQKISLQDHLDKAKKDITFYMPVDNLGMAVIDWEEWRPTWARNWKPKDVYKNRSIELVQVQNVQLSLTEATEKAKQEFEKAGKDFLVETIKLGKLLRPNHLWGYYLFPDCYNHHYKKPGYNGSCFNVEIKRNDDLSWLWNESTALYPSIYLNTQQSPVAATLYVRNRVREAIRVSKIPDAKSPLPVFAYTRIVFTDQVLKFLSQDELVYTFGETVALGASGIVIWGTLSIMRSMKSCLLLDNYMETILNPYIINVTLAAKMCSQVLCQEQGVCIRKNWNSSDYLHLNPDNFAIQLEKGGKFTVRGKPTLEDLEQFSEKFYCSCYSTLSCKEKADVKDTDAVDVCIADGVCIDAFLKPPMETEEPQIFY

SEQ ID NO: 109 - protein, 447 aa, Artificial Sequence
  Mature PH20 36-482 with G at a position corresponding to amino acid residue 36
LNFRAPPVIPNVPFLWAWNAPSEFCLGKFDEPLDMGLFSFIGSPRINATGQGVTIFYVDRLGYYPYIDSITGVTVNGGIPQKISLQDHLDKAKKDITFYMPVDNLGMAVIDWEEWRPTWARNWKPKDVYKNRSIELVQQQNVQLSLTEATEKAKQEFEKAGKDFLVETIKLGKLLRPNHLWGYYLFPDCYNHHYKKPGYNGSCFNVEIKRNDDLSWLWNESTALYPSIYLNTQQSPVAATLYVRNRVREAIRVSKIPDAKSPLPVFAYTRIVFTDQVLKFLSQDELVYTFGETVALGASGIVIWGTLSIMRSMKSCLLLDNYMETILNPYIINVTLAAKMCSQVLCQEQGVCIRKNWNSSDYLHLNPDNFAIQLEKGGKFTVRGKPTLEDLEQFSEKFYCSCYSTLSCKEKADVKDTDAVDVCIADGVCIDAFLKPPMETEEPQIFY

SEQ ID NO: 110 - protein, 447 aa, Artificial Sequence
  Mature PH20 36-482 with I at a position corresponding to amino acid residue 37
LNFRAPPVIPNVPFLWAWNAPSEFCLGKFDEPLDMSIFSFIGSPRINATGQGVTIFYVDRLGYYPYIDSITGVTVNGGIPQKISLQDHLDKAKKDITFYMPVDNLGMAVIDWEEWRPTWARNWKPKDVYKNRSIELVQQQNVQLSLTEATEKAKQEFEKAGKDFLVETIKLGKLLRPNHLWGYYLFPDCYNHHYKKPGYNGSCFNVEIKRNDDLSWLWNESTALYPSIYLNTQQSPVAATLYVRNRVREAIRVSKIPDAKSPLPVFAYTRIVFTDQVLKFLSQDELVYTFGETVALGASGIVIWGTLSIMRSMKSCLLLDNYMETILNPYIINVTLAAKMCSQVLCQEQGVCIRKNWNSSDYLHLNPDNFAIQLEKGGKFTVRGKPTLEDLEQFSEKFYCSCYSTLSCKEKADVKDTDAVDVCIADGVCIDAFLKPPMETEEPQIFY

SEQ ID NO: 111 - protein, 447 aa, Artificial Sequence
  Mature PH20 36-482 with Y at a position corresponding to amino acid residue 445
LNFRAPPVIPNVPFLWAWNAPSEFCLGKFDEPLDMSLFSFIGSPRINATGQGVTIFYVDRLGYYPYIDSITGVTVNGGIPQKISLQDHLDKAKKDITFYMPVDNLGMAVIDWEEWRPTWARNWKPKDVYKNRSIELVQQQNVQLSLTEATEKAKQEFEKAGKDFLVETIKLGKLLRPNHLWGYYLFPDCYNHHYKKPGYNGSCFNVEIKRNDDLSWLWNESTALYPSIYLNTQQSPVAATLYVRNRVREAIRVSKIPDAKSPLPVFAYTRIVFTDQVLKFLSQDELVYTFGETVALGASGIVIWGTLSIMRSMKSCLLLDNYMETILNPYIINVTLAAKMCSQVLCQEQGVCIRKNWNSSDYLHLNPDNFAIQLEKGGKFTVRGKPTLEDLEQFSEKFYCSCYSTLSCKEKADVKDTDAVDVCIADGVCIDAFLKPPMETEEPQYFY

SEQ ID NO: 112 - protein, 447 aa, Artificial Sequence
  Mature PH20 36-482 with A at a position corresponding to amino acid residue 155
LNFRAPPVIPNVPFLWAWNAPSEFCLGKFDEPLDMSLFSFIGSPRINATGQGVTIFYVDRLGYYPYIDSITGVTVNGGIPQKISLQDHLDKAKKDITFYMPVDNLGMAVIDWEEWRPTWARNWKPKDVYKNRSIELVQQQNVQLSLTEATEKAKAEFEKAGKDFLVETIKLGKLLRPNHLWGYYLFPDCYNHHYKKPGYNGSCFNVEIKRNDDLSWLWNESTALYPSIYLNTQQSPVAATLYVRNRVREAIRVSKIPDAKSPLPVFAYTRIVFTDQVLKFLSQDELVYTFGETVALGASGIVIWGTLSIMRSMKSCLLLDNYMETILNPYIINVTLAAKMCSQVLCQEQGVCIRKNWNSSDYLHLNPDNFAIQLEKGGKFTVRGKPTLEDLEQFSEKFYCSCYSTLSCKEKADVKDTDAVDVCIADGVCIDAFLKPPMETEEPQIFY

SEQ ID NO: 113 - protein, 447 aa, Artificial Sequence
  Mature PH20 36-482 with T at a position corresponding to amino acid residue 380
LNFRAPPVIPNVPFLWAWNAPSEFCLGKFDEPLDMSLFSFIGSPRINATGQGVTIFYVDRLGYYPYIDSITGVTVNGGIPQKISLQDHLDKAKKDITFYMPVDNLGMAVIDWEEWRPTWARNWKPKDVYKNRSIELVQQQNVQLSLTEATEKAKQEFEKAGKDFLVETIKLGKLLRPNHLWGYYLFPDCYNHHYKKPGYNGSCFNVEIKRNDDLSWLWNESTALYPSIYLNTQQSPVAATLYVRNRVREAIRVSKIPDAKSPLPVFAYTRIVFTDQVLKFLSQDELVYTFGETVALGASGIVIWGTLSIMRSMKSCLLLDNYMETILNPYIINVTLAAKMCSQVLCQEQGVCIRKNWNSSDYLHLNPDNFAIQLEKGGKTTVRGKPTLEDLEQFSEKFYCSCYSTLSCKEKADVKDTDAVDVCIADGVCIDAFLKPPMETEEPQIFY

SEQ ID NO: 114 - protein, 447 aa, Artificial Sequence
  Mature PH20 36-482 with R at a position corresponding to amino acid residue 86
LNFRAPPVIPNVPFLWAWNAPSEFCLGKFDEPLDMSLFSFIGSPRINATGQGVTIFYVDRLGYYPYIDSITGVTVNGGIPQKISLRDHLDKAKKDITFYMPVDNLGMAVIDWEEWRPTWARNWKPKDVYKNRSIELVQQQNVQLSLTEATEKAKQEFEKAGKDFLVETIKLGKLLRPNHLWGYYLFPDCYNHHYKKPGYNGSCFNVEIKRNDDLSWLWNESTALYPSIYLNTQQSPVAATLYVRNRVREAIRVSKIPDAKSPLPVFAYTRIVFTDQVLKFLSQDELVYTFGETVALGASGIVIWGTLSIMRSMKSCLLLDNYMETILNPYIINVTLAAKMCSQVLCQEQGVCIRKNWNSSDYLHLNPDNFAIQLEKGGKFTVRGKPTLEDLEQFSEKFYCSCYSTLSCKEKADVKDTDAVDVCIADGVCIDAFLKPPMETEEPQIFY

SEQ ID NO: 115 - protein, 447 aa, Artificial Sequence
  Mature PH20 36-482 with T at a position corresponding to amino acid residue 315
LNFRAPPVIPNVPFLWAWNAPSEFCLGKFDEPLDMSLFSFIGSPRINATGQGVTIFYVDRLGYYPYIDSITGVTVNGGIPQKISLQDHLDKAKKDITFYMPVDNLGMAVIDWEEWRPTWARNWKPKDVYKNRSIELVQQQNVQLSLTEATEKAKQEFEKAGKDFLVETIKLGKLLRPNHLWGYYLFPDCYNHHYKKPGYNGSCFNVEIKRNDDLSWLWNESTALYPSIYLNTQQSPVAATLYVRNRVREAIRVSKIPDAKSPLPVFAYTRIVFTDQVLKFLSQDELVYTFGETVALGASGIVIWGTLSIMRSMKTCLLLDNYMETILNPYIINVTLAAKMCSQVLCQEQGVCIRKNWNSSDYLHLNPDNFAIQLEKGGKFTVRGKPTLEDLEQFSEKFYCSCYSTLSCKEKADVKDTDAVDVCIADGVCIDAFLKPPMETEEPQIFY

SEQ ID NO: 116 - protein, 447 aa, Artificial Sequence
  Mature PH20 36-482 with H at a position corresponding to amino acid residue 369
LNFRAPPVIPNVPFLWAWNAPSEFCLGKFDEPLDMSLFSFIGSPRINATGQGVTIFYVDRLGYYPYIDSITGVTVNGGIPQKISLQDHLDKAKKDITFYMPVDNLGMAVIDWEEWRPTWARNWKPKDVYKNRSIELVQQQNVQLSLTEATEKAKQEFEKAGKDFLVETIKLGKLLRPNHLWGYYLFPDCYNHHYKKPGYNGSCFNVEIKRNDDLSWLWNESTALYPSIYLNTQQSPVAATLYVRNRVREAIRVSKIPDAKSPLPVFAYTRIVFTDQVLKFLSQDELVYTFGETVALGASGIVIWGTLSIMRSMKSCLLLDNYMETILNPYIINVTLAAKMCSQVLCQEQGVCIRKNWNSSDYLHLNPDHFAIQLEKGGKFTVRGKPTLEDLEQFSEKFYCSCYSTLSCKEKADVKDTDAVDVCIADGVCIDAFLKPPMETEEPQIFY

SEQ ID NO: 117 - protein, 447 aa, Artificial Sequence
  Mature PH20 36-482 with W at a position corresponding to amino acid residue 174
LNFRAPPVIPNVPFLWAWNAPSEFCLGKFDEPLDMSLFSFIGSPRINATGQGVTIFYVDRLGYYPYIDSITGVTVNGGIPQKISLQDHLDKAKKDITFYMPVDNLGMAVIDWEEWRPTWARNWKPKDVYKNRSIELVQQQNVQLSLTEATEKAKQEFEKAGKDFLVETIKLGKWLRPNHLWGYYLFPDCYNHHYKKPGYNGSCFNVEIKRNDDLSWLWNESTALYPSIYLNTQQSPVAATLYVRNRVREAIRVSKIPDAKSPLPVFAYTRIVFTDQVLKFLSQDELVYTFGETVALGASGIVIWGTLSIMRSMKSCLLLDNYMETILNPYIINVTLAAKMCSQVLCQEQGVCIRKNWNSSDYLHLNPDNFAIQLEKGGKFTVRGKPTLEDLEQFSEKFYCSCYSTLSCKEKADVKDTDAVDVCIADGVCIDAFLKPPMETEEPQIFY

SEQ ID NO: 118 - protein, 447 aa, Artificial Sequence
  Mature PH20 36-482 with H at a position corresponding to amino acid residue 379
LNFRAPPVIPNVPFLWAWNAPSEFCLGKFDEPLDMSLFSFIGSPRINATGQGVTIFYVDRLGYYPYIDSITGVTVNGGIPQKISLQDHLDKAKKDITFYMPVDNLGMAVIDWEEWRPTWARNWKPKDVYKNRSIELVQQQNVQLSLTEATEKAKQEFEKAGKDFLVETIKLGKLLRPNHLWGYYLFPDCYNHHYKKPGYNGSCFNVEIKRNDDLSWLWNESTALYPSIYLNTQQSPVAATLYVRNRVREAIRVSKIPDAKSPLPVFAYTRIVFTDQVLKFLSQDELVYTFGETVALGASGIVIWGTLSIMRSMKSCLLLDNYMETILNPYIINVTLAAKMCSQVLCQEQGVCIRKNWNSSDYLHLNPDNFAIQLEKGGHFTVRGKPTLEDLEQFSEKFYCSCYSTLSCKEKADVKDTDAVDVCIADGVCIDAFLKPPMETEEPQIFY

SEQ ID NO: 119 - protein, 447 aa, Artificial Sequence
  Mature PH20 36-482 with P at a position corresponding to amino acid residue 428
LNFRAPPVIPNVPFLWAWNAPSEFCLGKFDEPLDMSLFSFIGSPRINATGQGVTIFYVDRLGYYPYIDSITGVTVNGGIPQKISLQDHLDKAKKDITFYMPVDNLGMAVIDWEEWRPTWARNWKPKDVYKNRSIELVQQQNVQLSLTEATEKAKQEFEKAGKDFLVETIKLGKLLRPNHLWGYYLFPDCYNHHYKKPGYNGSCFNVEIKRNDDLSWLWNESTALYPSIYLNTQQSPVAATLYVRNRVREAIRVSKIPDAKSPLPVFAYTRIVFTDQVLKFLSQDELVYTFGETVALGASGIVIWGTLSIMRSMKSCLLLDNYMETILNPYIINVTLAAKMCSQVLCQEQGVCIRKNWNSSDYLHLNPDNFAIQLEKGGKFTVRGKPTLEDLEQFSEKFYCSCYSTLSCKEKADVKDTDAVDVCIADGPCIDAFLKPPMETEEPQIFY

SEQ ID NO: 120 - protein, 447 aa, Artificial Sequence
  Mature PH20 36-482 with H at a position corresponding to amino acid residue 46
LNFRAPPVIPNVPFLWAWNAPSEFCLGKFDEPLDMSLFSFIGSPRHNATGQGVTIFYVDRLGYYPYIDSITGVTVNGGIPQKISLQDHLDKAKKDITFYMPVDNLGMAVIDWEEWRPTWARNWKPKDVYKNRSIELVQQQNVQLSLTEATEKAKQEFEKAGKDFLVETIKLGKLLRPNHLWGYYLFPDCYNHHYKKPGYNGSCFNVEIKRNDDLSWLWNESTALYPSIYLNTQQSPVAATLYVRNRVREAIRVSKIPDAKSPLPVFAYTRIVFTDQVLKFLSQDELVYTFGETVALGASGIVIWGTLSIMRSMKSCLLLDNYMETILNPYIINVTLAAKMCSQVLCQEQGVCIRKNWNSSDYLHLNPDNFAIQLEKGGKFTVRGKPTLEDLEQFSEKFYCSCYSTLSCKEKADVKDTDAVDVCIADGVCIDAFLKPPMETEEPQIFY

SEQ ID NO: 121 - protein, 447 aa, Artificial Sequence
  Mature PH20 36-482 with G at a position corresponding to amino acid residue 47
LNFRAPPVIPNVPFLWAWNAPSEFCLGKFDEPLDMSLFSFIGSPRIGATGQGVTIFYVDRLGYYPYIDSITGVTVNGGIPQKISLQDHLDKAKKDITFYMPVDNLGMAVIDWEEWRPTWARNWKPKDVYKNRSIELVQQQNVQLSLTEATEKAKQEFEKAGKDFLVETIKLGKLLRPNHLWGYYLFPDCYNHHYKKPGYNGSCFNVEIKRNDDLSWLWNESTALYPSIYLNTQQSPVAATLYVRNRVREAIRVSKIPDAKSPLPVFAYTRIVFTDQVLKFLSQDELVYTFGETVALGASGIVIWGTLSIMRSMKSCLLLDNYMETILNPYIINVTLAAKMCSQVLCQEQGVCIRKNWNSSDYLHLNPDNFAIQLEKGGKFTVRGKPTLEDLEQFSEKFYCSCYSTLSCKEKADVKDTDAVDVCIADGVCIDAFLKPPMETEEPQIFY

SEQ ID NO: 122 - protein, 447 aa, Artificial Sequence
  Mature PH20 36-482 with R at a position corresponding to amino acid residue 47
LNFRAPPVIPNVPFLWAWNAPSEFCLGKFDEPLDMSLFSFIGSPRIRATGQGVTIFYVDRLGYYPYIDSITGVTVNGGIPQKISLQDHLDKAKKDITFYMPVDNLGMAVIDWEEWRPTWARNWKPKDVYKNRSIELVQQQNVQLSLTEATEKAKQEFEKAGKDFLVETIKLGKLLRPNHLWGYYLFPDCYNHHYKKPGYNGSCFNVEIKRNDDLSWLWNESTALYPSIYLNTQQSPVAATLYVRNRVREAIRVSKIPDAKSPLPVFAYTRIVFTDQVLKFLSQDELVYTFGETVALGASGIVIWGTLSIMRSMKSCLLLDNYMETILNPYIINVTLAAKMCSQVLCQEQGVCIRKNWNSSDYLHLNPDNFAIQLEKGGKFTVRGKPTLEDLEQFSEKFYCSCYSTLSCKEKADVKDTDAVDVCIADGVCIDAFLKPPMETEEPQIFY

SEQ ID NO: 123 - protein, 447 aa, Artificial Sequence
  Mature PH20 36-482 with A at a position corresponding to amino acid residue 431
LNFRAPPVIPNVPFLWAWNAPSEFCLGKFDEPLDMSLFSFIGSPRINATGQGVTIFYVDRLGYYPYIDSITGVTVNGGIPQKISLQDHLDKAKKDITFYMPVDNLGMAVIDWEEWRPTWARNWKPKDVYKNRSIELVQQQNVQLSLTEATEKAKQEFEKAGKDFLVETIKLGKLLRPNHLWGYYLFPDCYNHHYKKPGYNGSCFNVEIKRNDDLSWLWNESTALYPSIYLNTQQSPVAATLYVRNRVREAIRVSKIPDAKSPLPVFAYTRIVFTDQVLKFLSQDELVYTFGETVALGASGIVIWGTLSIMRSMKSCLLLDNYMETILNPYIINVTLAAKMCSQVLCQEQGVCIRKNWNSSDYLHLNPDNFAIQLEKGGKFTVRGKPTLEDLEQFSEKFYCSCYSTLSCKEKADVKDTDAVDVCIADGVCIAAFLKPPMETEEPQIFY

SEQ ID NO: 124 - protein, 447 aa, Artificial Sequence
  Mature PH20 36-482 with Y at a position corresponding to amino acid residue 48
LNFRAPPVIPNVPFLWAWNAPSEFCLGKFDEPLDMSLFSFIGSPRINYTGQGVTIFYVDRLGYYPYIDSITGVTVNGGIPQKISLQDHLDKAKKDITFYMPVDNLGMAVIDWEEWRPTWARNWKPKDVYKNRSIELVQQQNVQLSLTEATEKAKQEFEKAGKDFLVETIKLGKLLRPNHLWGYYLFPDCYNHHYKKPGYNGSCFNVEIKRNDDLSWLWNESTALYPSIYLNTQQSPVAATLYVRNRVREAIRVSKIPDAKSPLPVFAYTRIVFTDQVLKFLSQDELVYTFGETVALGASGIVIWGTLSIMRSMKSCLLLDNYMETILNPYIINVTLAAKMCSQVLCQEQGVCIRKNWNSSDYLHLNPDNFAIQLEKGGKFTVRGKPTLEDLEQFSEKFYCSCYSTLSCKEKADVKDTDAVDVCIADGVCIDAFLKPPMETEEPQIFY

SEQ ID NO: 125 - protein, 447 aa, Artificial Sequence
  Mature PH20 36-482 with I at a position corresponding to amino acid residue 49
LNFRAPPVIPNVPFLWAWNAPSEFCLGKFDEPLDMSLFSFIGSPRINAIGQGVTIFYVDRLGYYPYIDSITGVTVNGGIPQKISLQDHLDKAKKDITFYMPVDNLGMAVIDWEEWRPTWARNWKPKDVYKNRSIELVQQQNVQLSLTEATEKAKQEFEKAGKDFLVETIKLGKLLRPNHLWGYYLFPDCYNHHYKKPGYNGSCFNVEIKRNDDLSWLWNESTALYPSIYLNTQQSPVAATLYVRNRVREAIRVSKIPDAKSPLPVFAYTRIVFTDQVLKFLSQDELVYTFGETVALGASGIVIWGTLSIMRSMKSCLLLDNYMETILNPYIINVTLAAKMCSQVLCQEQGVCIRKNWNSSDYLHLNPDNFAIQLEKGGKFTVRGKPTLEDLEQFSEKFYCSCYSTLSCKEKADVKDTDAVDVCIADGVCIDAFLKPPMETEEPQIFY

SEQ ID NO: 126 - protein, 447 aa, Artificial Sequence
  Mature PH20 36-482 with W at a position corresponding to amino acid residue 41
LNFRAPPVIPNVPFLWAWNAPSEFCLGKFDEPLDMSLFSFWGSPRINATGQGVTIFYVDRLGYYPYIDSITGVTVNGGIPQKISLQDHLDKAKKDITFYMPVDNLGMAVIDWEEWRPTWARNWKPKDVYKNRSIELVQQQNVQLSLTEATEKAKQEFEKAGKDFLVETIKLGKLLRPNHLWGYYLFPDCYNHHYKKPGYNGSCFNVEIKRNDDLSWLWNESTALYPSIYLNTQQSPVAATLYVRNRVREAIRVSKIPDAKSPLPVFAYTRIVFTDQVLKFLSQDELVYTFGETVALGASGIVIWGTLSIMRSMKSCLLLDNYMETILNPYIINVTLAAKMCSQVLCQEQGVCIRKNWNSSDYLHLNPDNFAIQLEKGGKFTVRGKPTLEDLEQFSEKFYCSCYSTLSCKEKADVKDTDAVDVCIADGVCIDAFLKPPMETEEPQIFY

SEQ ID NO: 127 - protein, 447 aa, Artificial Sequence
  Mature PH20 36-482 with K at a position corresponding to amino acid residue 259
LNFRAPPVIPNVPFLWAWNAPSEFCLGKFDEPLDMSLFSFIGSPRINATGQGVTIFYVDRLGYYPYIDSITGVTVNGGIPQKISLQDHLDKAKKDITFYMPVDNLGMAVIDWEEWRPTWARNWKPKDVYKNRSIELVQQQNVQLSLTEATEKAKQEFEKAGKDFLVETIKLGKLLRPNHLWGYYLFPDCYNHHYKKPGYNGSCFNVEIKRNDDLSWLWNESTALYPSIYLNTQQSPVAATLYVRNRVREAIRVSKIPDKKSPLPVFAYTRIVFTDQVLKFLSQDELVYTFGETVALGASGIVIWGTLSIMRSMKSCLLLDNYMETILNPYIINVTLAAKMCSQVLCQEQGVCIRKNWNSSDYLHLNPDNFAIQLEKGGKFTVRGKPTLEDLEQFSEKFYCSCYSTLSCKEKADVKDTDAVDVCIADGVCIDAFLKPPMETEEPQIFY

SEQ ID NO: 128 - protein, 447 aa, Artificial Sequence
  Mature PH20 36-482 with R at a position corresponding to amino acid residue 39
LNFRAPPVIPNVPFLWAWNAPSEFCLGKFDEPLDMSLFRFIGSPRINATGQGVTIFYVDRLGYYPYIDSITGVTVNGGIPQKISLQDHLDKAKKDITFYMPVDNLGMAVIDWEEWRPTWARNWKPKDVYKNRSIELVQQQNVQLSLTEATEKAKQEFEKAGKDFLVETIKLGKLLRPNHLWGYYLFPDCYNHHYKKPGYNGSCFNVEIKRNDDLSWLWNESTALYPSIYLNTQQSPVAATLYVRNRVREAIRVSKIPDAKSPLPVFAYTRIVFTDQVLKFLSQDELVYTFGETVALGASGIVIWGTLSIMRSMKSCLLLDNYMETILNPYIINVTLAAKMCSQVLCQEQGVCIRKNWNSSDYLHLNPDNFAIQLEKGGKFTVRGKPTLEDLEQFSEKFYCSCYSTLSCKEKADVKDTDAVDVCIADGVCIDAFLKPPMETEEPQIFY

SEQ ID NO: 129 - protein, 447 aa, Artificial Sequence
  Mature PH20 36-482 with A at a position corresponding to amino acid residue 277
LNFRAPPVIPNVPFLWAWNAPSEFCLGKFDEPLDMSLFSFIGSPRINATGQGVTIFYVDRLGYYPYIDSITGVTVNGGIPQKISLQDHLDKAKKDITFYMPVDNLGMAVIDWEEWRPTWARNWKPKDVYKNRSIELVQQQNVQLSLTEATEKAKQEFEKAGKDFLVETIKLGKLLRPNHLWGYYLFPDCYNHHYKKPGYNGSCFNVEIKRNDDLSWLWNESTALYPSIYLNTQQSPVAATLYVRNRVREAIRVSKIPDAKSPLPVFAYTRIVFTDQALKFLSQDELVYTFGETVALGASGIVIWGTLSIMRSMKSCLLLDNYMETILNPYIINVTLAAKMCSQVLCQEQGVCIRKNWNSSDYLHLNPDNFAIQLEKGGKFTVRGKPTLEDLEQFSEKFYCSCYSTLSCKEKADVKDTDAVDVCIADGVCIDAFLKPPMETEEPQIFY

SEQ ID NO: 130 - protein, 447 aa, Artificial Sequence
  Mature PH20 36-482 with C at a position corresponding to amino acid residue 277
LNFRAPPVIPNVPFLWAWNAPSEFCLGKFDEPLDMSLFSFIGSPRINATGQGVTIFYVDRLGYYPYIDSITGVTVNGGIPQKISLQDHLDKAKKDITFYMPVDNLGMAVIDWEEWRPTWARNWKPKDVYKNRSIELVQQQNVQLSLTEATEKAKQEFEKAGKDFLVETIKLGKLLRPNHLWGYYLFPDCYNHHYKKPGYNGSCFNVEIKRNDDLSWLWNESTALYPSIYLNTQQSPVAATLYVRNRVREAIRVSKIPDAKSPLPVFAYTRIVFTDQCLKFLSQDELVYTFGETVALGASGIVIWGTLSIMRSMKSCLLLDNYMETILNPYIINVTLAAKMCSQVLCQEQGVCIRKNWNSSDYLHLNPDNFAIQLEKGGKFTVRGKPTLEDLEQFSEKFYCSCYSTLSCKEKADVKDTDAVDVCIADGVCIDAFLKPPMETEEPQIFY

SEQ ID NO: 131 - protein, 447 aa, Artificial Sequence
  Mature PH20 36-482 with A at a position corresponding to amino acid residue 284
LNFRAPPVIPNVPFLWAWNAPSEFCLGKFDEPLDMSLFSFIGSPRINATGQGVTIFYVDRLGYYPYIDSITGVTVNGGIPQKISLQDHLDKAKKDITFYMPVDNLGMAVIDWEEWRPTWARNWKPKDVYKNRSIELVQQQNVQLSLTEATEKAKQEFEKAGKDFLVETIKLGKLLRPNHLWGYYLFPDCYNHHYKKPGYNGSCFNVEIKRNDDLSWLWNESTALYPSIYLNTQQSPVAATLYVRNRVREAIRVSKIPDAKSPLPVFAYTRIVFTDQVLKFLSQAELVYTFGETVALGASGIVIWGTLSIMRSMKSCLLLDNYMETILNPYIINVTLAAKMCSQVLCQEQGVCIRKNWNSSDYLHLNPDNFAIQLEKGGKFTVRGKPTLEDLEQFSEKFYCSCYSTLSCKEKADVKDTDAVDVCIADGVCIDAFLKPPMETEEPQIFY

SEQ ID NO: 132 - protein, 447 aa, Artificial Sequence
  Mature PH20 36-482 with A at a position corresponding to amino acid residue 15
LNFRAPPVIPNVPFAWAWNAPSEFCLGKFDEPLDMSLFSFIGSPRINATGQGVTIFYVDRLGYYPYIDSITGVTVNGGIPQKISLQDHLDKAKKDITFYMPVDNLGMAVIDWEEWRPTWARNWKPKDVYKNRSIELVQQQNVQLSLTEATEKAKQEFEKAGKDFLVETIKLGKLLRPNHLWGYYLFPDCYNHHYKKPGYNGSCFNVEIKRNDDLSWLWNESTALYPSIYLNTQQSPVAATLYVRNRVREAIRVSKIPDAKSPLPVFAYTRIVFTDQVLKFLSQDELVYTFGETVALGASGIVIWGTLSIMRSMKSCLLLDNYMETILNPYIINVTLAAKMCSQVLCQEQGVCIRKNWNSSDYLHLNPDNFAIQLEKGGKFTVRGKPTLEDLEQFSEKFYCSCYSTLSCKEKADVKDTDAVDVCIADGVCIDAFLKPPMETEEPQIFY

SEQ ID NO: 133 - protein, 447 aa, Artificial Sequence
  Mature PH20 36-482 with D at a position corresponding to amino acid residue 72
LNFRAPPVIPNVPFLWAWNAPSEFCLGKFDEPLDMSLFSFIGSPRINATGQGVTIFYVDRLGYYPYIDSITDVTVNGGIPQKISLQDHLDKAKKDITFYMPVDNLGMAVIDWEEWRPTWARNWKPKDVYKNRSIELVQQQNVQLSLTEATEKAKQEFEKAGKDFLVETIKLGKLLRPNHLWGYYLFPDCYNHHYKKPGYNGSCFNVEIKRNDDLSWLWNESTALYPSIYLNTQQSPVAATLYVRNRVREAIRVSKIPDAKSPLPVFAYTRIVFTDQVLKFLSQDELVYTFGETVALGASGIVIWGTLSIMRSMKSCLLLDNYMETILNPYIINVTLAAKMCSQVLCQEQGVCIRKNWNSSDYLHLNPDNFAIQLEKGGKFTVRGKPTLEDLEQFSEKFYCSCYSTLSCKEKADVKDTDAVDVCIADGVCIDAFLKPPMETEEPQIFY

SEQ ID NO: 134 - protein, 447 aa, Artificial Sequence
  Mature PH20 36-482 with T at a position corresponding to amino acid residue 73
LNFRAPPVIPNVPFLWAWNAPSEFCLGKFDEPLDMSLFSFIGSPRINATGQGVTIFYVDRLGYYPYIDSITGTTVNGGIPQKISLQDHLDKAKKDITFYMPVDNLGMAVIDWEEWRPTWARNWKPKDVYKNRSIELVQQQNVQLSLTEATEKAKQEFEKAGKDFLVETIKLGKLLRPNHLWGYYLFPDCYNHHYKKPGYNGSCFNVEIKRNDDLSWLWNESTALYPSIYLNTQQSPVAATLYVRNRVREAIRVSKIPDAKSPLPVFAYTRIVFTDQVLKFLSQDELVYTFGETVALGASGIVIWGTLSIMRSMKSCLLLDNYMETILNPYIINVTLAAKMCSQVLCQEQGVCIRKNWNSSDYLHLNPDNFAIQLEKGGKFTVRGKPTLEDLEQFSEKFYCSCYSTLSCKEKADVKDTDAVDVCIADGVCIDAFLKPPMETEEPQIFY

SEQ ID NO: 135 - protein, 447 aa, Artificial Sequence
  Mature PH20 36-482 with G at a position corresponding to amino acid residue 83
LNFRAPPVIPNVPFLWAWNAPSEFCLGKFDEPLDMSLFSFIGSPRINATGQGVTIFYVDRLGYYPYIDSITGVTVNGGIPQKGSLQDHLDKAKKDITFYMPVDNLGMAVIDWEEWRPTWARNWKPKDVYKNRSIELVQQQNVQLSLTEATEKAKQEFEKAGKDFLVETIKLGKLLRPNHLWGYYLFPDCYNHHYKKPGYNGSCFNVEIKRNDDLSWLWNESTALYPSIYLNTQQSPVAATLYVRNRVREAIRVSKIPDAKSPLPVFAYTRIVFTDQVLKFLSQDELVYTFGETVALGASGIVIWGTLSIMRSMKSCLLLDNYMETILNPYIINVTLAAKMCSQVLCQEQGVCIRKNWNSSDYLHLNPDNFAIQLEKGGKFTVRGKPTLEDLEQFSEKFYCSCYSTLSCKEKADVKDTDAVDVCIADGVCIDAFLKPPMETEEPQIFY

SEQ ID NO: 136 - protein, 447 aa, Artificial Sequence
  Mature PH20 36-482 with S at a position corresponding to amino acid residue 284
LNFRAPPVIPNVPFLWAWNAPSEFCLGKFDEPLDMSLFSFIGSPRINATGQGVTIFYVDRLGYYPYIDSITGVTVNGGIPQKISLQDHLDKAKKDITFYMPVDNLGMAVIDWEEWRPTWARNWKPKDVYKNRSIELVQQQNVQLSLTEATEKAKQEFEKAGKDFLVETIKLGKLLRPNHLWGYYLFPDCYNHHYKKPGYNGSCFNVEIKRNDDLSWLWNESTALYPSIYLNTQQSPVAATLYVRNRVREAIRVSKIPDAKSPLPVFAYTRIVFTDQVLKFLSQSELVYTFGETVALGASGIVIWGTLSIMRSMKSCLLLDNYMETILNPYIINVTLAAKMCSQVLCQEQGVCIRKNWNSSDYLHLNPDNFAIQLEKGGKFTVRGKPTLEDLEQFSEKFYCSCYSTLSCKEKADVKDTDAVDVCIADGVCIDAFLKPPMETEEPQIFY

SEQ ID NO: 137 - protein, 447 aa, Artificial Sequence
  Mature PH20 36-482 with V at a position corresponding to amino acid residue 83
LNFRAPPVIPNVPFLWAWNAPSEFCLGKFDEPLDMSLFSFIGSPRINATGQGVTIFYVDRLGYYPYIDSITGVTVNGGIPQKVSLQDHLDKAKKDITFYMPVDNLGMAVIDWEEWRPTWARNWKPKDVYKNRSIELVQQQNVQLSLTEATEKAKQEFEKAGKDFLVETIKLGKLLRPNHLWGYYLFPDCYNHHYKKPGYNGSCFNVEIKRNDDLSWLWNESTALYPSIYLNTQQSPVAATLYVRNRVREAIRVSKIPDAKSPLPVFAYTRIVFTDQVLKFLSQDELVYTFGETVALGASGIVIWGTLSIMRSMKSCLLLDNYMETILNPYIINVTLAAKMCSQVLCQEQGVCIRKNWNSSDYLHLNPDNFAIQLEKGGKFTVRGKPTLEDLEQFSEKFYCSCYSTLSCKEKADVKDTDAVDVCIADGVCIDAFLKPPMETEEPQIFY

SEQ ID NO: 138 - protein, 447 aa, Artificial Sequence
  Mature PH20 36-482 with Q at a position corresponding to amino acid residue 151
LNFRAPPVIPNVPFLWAWNAPSEFCLGKFDEPLDMSLFSFIGSPRINATGQGVTIFYVDRLGYYPYIDSITGVTVNGGIPQKISLQDHLDKAKKDITFYMPVDNLGMAVIDWEEWRPTWARNWKPKDVYKNRSIELVQQQNVQLSLTEATQKAKQEFEKAGKDFLVETIKLGKLLRPNHLWGYYLFPDCYNHHYKKPGYNGSCFNVEIKRNDDLSWLWNESTALYPSIYLNTQQSPVAATLYVRNRVREAIRVSKIPDAKSPLPVFAYTRIVFTDQVLKFLSQDELVYTFGETVALGASGIVIWGTLSIMRSMKSCLLLDNYMETILNPYIINVTLAAKMCSQVLCQEQGVCIRKNWNSSDYLHLNPDNFAIQLEKGGKFTVRGKPTLEDLEQFSEKFYCSCYSTLSCKEKADVKDTDAVDVCIADGVCIDAFLKPPMETEEPQIFY

SEQ ID NO: 139 - protein, 447 aa, Artificial Sequence
  Mature PH20 36-482 with F at a position corresponding to amino acid residue 371
LNFRAPPVIPNVPFLWAWNAPSEFCLGKFDEPLDMSLFSFIGSPRINATGQGVTIFYVDRLGYYPYIDSITGVTVNGGIPQKISLQDHLDKAKKDITFYMPVDNLGMAVIDWEEWRPTWARNWKPKDVYKNRSIELVQQQNVQLSLTEATEKAKQEFEKAGKDFLVETIKLGKLLRPNHLWGYYLFPDCYNHHYKKPGYNGSCFNVEIKRNDDLSWLWNESTALYPSIYLNTQQSPVAATLYVRNRVREAIRVSKIPDAKSPLPVFAYTRIVFTDQVLKFLSQDELVYTFGETVALGASGIVIWGTLSIMRSMKSCLLLDNYMETILNPYIINVTLAAKMCSQVLCQEQGVCIRKNWNSSDYLHLNPDNFFIQLEKGGKFTVRGKPTLEDLEQFSEKFYCSCYSTLSCKEKADVKDTDAVDVCIADGVCIDAFLKPPMETEEPQIFY

SEQ ID NO: 140 - protein, 447 aa, Artificial Sequence
  Mature PH20 36-482 with M at a position corresponding to amino acid residue 443
LNFRAPPVIPNVPFLWAWNAPSEFCLGKFDEPLDMSLFSFIGSPRINATGQGVTIFYVDRLGYYPYIDSITGVTVNGGIPQKISLQDHLDKAKKDITFYMPVDNLGMAVIDWEEWRPTWARNWKPKDVYKNRSIELVQQQNVQLSLTEATEKAKQEFEKAGKDFLVETIKLGKLLRPNHLWGYYLFPDCYNHHYKKPGYNGSCFNVEIKRNDDLSWLWNESTALYPSIYLNTQQSPVAATLYVRNRVREAIRVSKIPDAKSPLPVFAYTRIVFTDQVLKFLSQDELVYTFGETVALGASGIVIWGTLSIMRSMKSCLLLDNYMETILNPYIINVTLAAKMCSQVLCQEQGVCIRKNWNSSDYLHLNPDNFAIQLEKGGKFTVRGKPTLEDLEQFSEKFYCSCYSTLSCKEKADVKDTDAVDVCIADGVCIDAFLKPPMETEEMQIFY

SEQ ID NO: 141 - protein, 447 aa, Artificial Sequence
  Mature PH20 36-482 with N at a position corresponding to amino acid residue 86
LNFRAPPVIPNVPFLWAWNAPSEFCLGKFDEPLDMSLFSFIGSPRINATGQGVTIFYVDRLGYYPYIDSITGVTVNGGIPQKISLNDHLDKAKKDITFYMPVDNLGMAVIDWEEWRPTWARNWKPKDVYKNRSIELVQQQNVQLSLTEATEKAKQEFEKAGKDFLVETIKLGKLLRPNHLWGYYLFPDCYNHHYKKPGYNGSCFNVEIKRNDDLSWLWNESTALYPSIYLNTQQSPVAATLYVRNRVREAIRVSKIPDAKSPLPVFAYTRIVFTDQVLKFLSQDELVYTFGETVALGASGIVIWGTLSIMRSMKSCLLLDNYMETILNPYIINVTLAAKMCSQVLCQEQGVCIRKNWNSSDYLHLNPDNFAIQLEKGGKFTVRGKPTLEDLEQFSEKFYCSCYSTLSCKEKADVKDTDAVDVCIADGVCIDAFLKPPMETEEPQIFY

SEQ ID NO: 142 - protein, 447 aa, Artificial Sequence
  Mature PH20 36-482 with R at a position corresponding to amino acid residue 26
LNFRAPPVIPNVPFLWAWNAPSEFCRGKFDEPLDMSLFSFIGSPRINATGQGVTIFYVDRLGYYPYIDSITGVTVNGGIPQKISLQDHLDKAKKDITFYMPVDNLGMAVIDWEEWRPTWARNWKPKDVYKNRSIELVQQQNVQLSLTEATEKAKQEFEKAGKDFLVETIKLGKLLRPNHLWGYYLFPDCYNHHYKKPGYNGSCFNVEIKRNDDLSWLWNESTALYPSIYLNTQQSPVAATLYVRNRVREAIRVSKIPDAKSPLPVFAYTRIVFTDQVLKFLSQDELVYTFGETVALGASGIVIWGTLSIMRSMKSCLLLDNYMETILNPYIINVTLAAKMCSQVLCQEQGVCIRKNWNSSDYLHLNPDNFAIQLEKGGKFTVRGKPTLEDLEQFSEKFYCSCYSTLSCKEKADVKDTDAVDVCIADGVCIDAFLKPPMETEEPQIFY

SEQ ID NO: 143 - protein, 447 aa, Artificial Sequence
  Mature PH20 36-482 with M at a position corresponding to amino acid residue 87
LNFRAPPVIPNVPFLWAWNAPSEFCLGKFDEPLDMSLFSFIGSPRINATGQGVTIFYVDRLGYYPYIDSITGVTVNGGIPQKISLQMHLDKAKKDITFYMPVDNLGMAVIDWEEWRPTWARNWKPKDVYKNRSIELVQQQNVQLSLTEATEKAKQEFEKAGKDFLVETIKLGKLLRPNHLWGYYLFPDCYNHHYKKPGYNGSCFNVEIKRNDDLSWLWNESTALYPSIYLNTQQSPVAATLYVRNRVREAIRVSKIPDAKSPLPVFAYTRIVFTDQVLKFLSQDELVYTFGETVALGASGIVIWGTLSIMRSMKSCLLLDNYMETILNPYIINVTLAAKMCSQVLCQEQGVCIRKNWNSSDYLHLNPDNFAIQLEKGGKFTVRGKPTLEDLEQFSEKFYCSCYSTLSCKEKADVKDTDAVDVCIADGVCIDAFLKPPMETEEPQIFY

SEQ ID NO: 144 - protein, 447 aa, Artificial Sequence
  Mature PH20 36-482 with R at a position corresponding to amino acid residue 139
LNFRAPPVIPNVPFLWAWNAPSEFCLGKFDEPLDMSLFSFIGSPRINATGQGVTIFYVDRLGYYPYIDSITGVTVNGGIPQKISLQDHLDKAKKDITFYMPVDNLGMAVIDWEEWRPTWARNWKPKDVYKNRSIELVQRQNVQLSLTEATEKAKQEFEKAGKDFLVETIKLGKLLRPNHLWGYYLFPDCYNHHYKKPGYNGSCFNVEIKRNDDLSWLWNESTALYPSIYLNTQQSPVAATLYVRNRVREAIRVSKIPDAKSPLPVFAYTRIVFTDQVLKFLSQDELVYTFGETVALGASGIVIWGTLSIMRSMKSCLLLDNYMETILNPYIINVTLAAKMCSQVLCQEQGVCIRKNWNSSDYLHLNPDNFAIQLEKGGKFTVRGKPTLEDLEQFSEKFYCSCYSTLSCKEKADVKDTDAVDVCIADGVCIDAFLKPPMETEEPQIFY

SEQ ID NO: 145 - protein, 447 aa, Artificial Sequence
  Mature PH20 36-482 with V at a position corresponding to amino acid residue 87
LNFRAPPVIPNVPFLWAWNAPSEFCLGKFDEPLDMSLFSFIGSPRINATGQGVTIFYVDRLGYYPYIDSITGVTVNGGIPQKISLQVHLDKAKKDITFYMPVDNLGMAVIDWEEWRPTWARNWKPKDVYKNRSIELVQQQNVQLSLTEATEKAKQEFEKAGKDFLVETIKLGKLLRPNHLWGYYLFPDCYNHHYKKPGYNGSCFNVEIKRNDDLSWLWNESTALYPSIYLNTQQSPVAATLYVRNRVREAIRVSKIPDAKSPLPVFAYTRIVFTDQVLKFLSQDELVYTFGETVALGASGIVIWGTLSIMRSMKSCLLLDNYMETILNPYIINVTLAAKMCSQVLCQEQGVCIRKNWNSSDYLHLNPDNFAIQLEKGGKFTVRGKPTLEDLEQFSEKFYCSCYSTLSCKEKADVKDTDAVDVCIADGVCIDAFLKPPMETEEPQIFY

SEQ ID NO: 146 - protein, 447 aa, Artificial Sequence
  Mature PH20 36-482 with E at a position corresponding to amino acid residue 90
LNFRAPPVIPNVPFLWAWNAPSEFCLGKFDEPLDMSLFSFIGSPRINATGQGVTIFYVDRLGYYPYIDSITGVTVNGGIPQKISLQDHLEKAKKDITFYMPVDNLGMAVIDWEEWRPTWARNWKPKDVYKNRSIELVQQQNVQLSLTEATEKAKQEFEKAGKDFLVETIKLGKLLRPNHLWGYYLFPDCYNHHYKKPGYNGSCFNVEIKRNDDLSWLWNESTALYPSIYLNTQQSPVAATLYVRNRVREAIRVSKIPDAKSPLPVFAYTRIVFTDQVLKFLSQDELVYTFGETVALGASGIVIWGTLSIMRSMKSCLLLDNYMETILNPYIINVTLAAKMCSQVLCQEQGVCIRKNWNSSDYLHLNPDNFAIQLEKGGKFTVRGKPTLEDLEQFSEKFYCSCYSTLSCKEKADVKDTDAVDVCIADGVCIDAFLKPPMETEEPQIFY

SEQ ID NO: 147 - protein, 447 aa, Artificial Sequence
  Mature PH20 36-482 with T at a position corresponding to amino acid residue 90
LNFRAPPVIPNVPFLWAWNAPSEFCLGKFDEPLDMSLFSFIGSPRINATGQGVTIFYVDRLGYYPYIDSITGVTVNGGIPQKISLQDHLTKAKKDITFYMPVDNLGMAVIDWEEWRPTWARNWKPKDVYKNRSIELVQQQNVQLSLTEATEKAKQEFEKAGKDFLVETIKLGKLLRPNHLWGYYLFPDCYNHHYKKPGYNGSCFNVEIKRNDDLSWLWNESTALYPSIYLNTQQSPVAATLYVRNRVREAIRVSKIPDAKSPLPVFAYTRIVFTDQVLKFLSQDELVYTFGETVALGASGIVIWGTLSIMRSMKSCLLLDNYMETILNPYIINVTLAAKMCSQVLCQEQGVCIRKNWNSSDYLHLNPDNFAIQLEKGGKFTVRGKPTLEDLEQFSEKFYCSCYSTLSCKEKADVKDTDAVDVCIADGVCIDAFLKPPMETEEPQIFY

SEQ ID NO: 148 - protein, 447 aa, Artificial Sequence
  Mature PH20 36-482 with E at a position corresponding to amino acid residue 215
LNFRAPPVIPNVPFLWAWNAPSEFCLGKFDEPLDMSLFSFIGSPRINATGQGVTIFYVDRLGYYPYIDSITGVTVNGGIPQKISLQDHLDKAKKDITFYMPVDNLGMAVIDWEEWRPTWARNWKPKDVYKNRSIELVQQQNVQLSLTEATEKAKQEFEKAGKDFLVETIKLGKLLRPNHLWGYYLFPDCYNHHYKKPGYNGSCFNVEIKRNDDLEWLWNESTALYPSIYLNTQQSPVAATLYVRNRVREAIRVSKIPDAKSPLPVFAYTRIVFTDQVLKFLSQDELVYTFGETVALGASGIVIWGTLSIMRSMKSCLLLDNYMETILNPYIINVTLAAKMCSQVLCQEQGVCIRKNWNSSDYLHLNPDNFAIQLEKGGKFTVRGKPTLEDLEQFSEKFYCSCYSTLSCKEKADVKDTDAVDVCIADGVCIDAFLKPPMETEEPQIFY

SEQ ID NO: 149 - protein, 447 aa, Artificial Sequence
  Mature PH20 36-482 with G at a position corresponding to amino acid residue 33
LNFRAPPVIPNVPFLWAWNAPSEFCLGKFDEPGDMSLFSFIGSPRINATGQGVTIFYVDRLGYYPYIDSITGVTVNGGIPQKISLQDHLDKAKKDITFYMPVDNLGMAVIDWEEWRPTWARNWKPKDVYKNRSIELVQQQNVQLSLTEATEKAKQEFEKAGKDFLVETIKLGKLLRPNHLWGYYLFPDCYNHHYKKPGYNGSCFNVEIKRNDDLSWLWNESTALYPSIYLNTQQSPVAATLYVRNRVREAIRVSKIPDAKSPLPVFAYTRIVFTDQVLKFLSQDELVYTFGETVALGASGIVIWGTLSIMRSMKSCLLLDNYMETILNPYIINVTLAAKMCSQVLCQEQGVCIRKNWNSSDYLHLNPDNFAIQLEKGGKFTVRGKPTLEDLEQFSEKFYCSCYSTLSCKEKADVKDTDAVDVCIADGVCIDAFLKPPMETEEPQIFY

SEQ ID NO: 150 - protein, 447 aa, Artificial Sequence
  Mature PH20 36-482 with M at a position corresponding to amino acid residue 33
LNFRAPPVIPNVPFLWAWNAPSEFCLGKFDEPMDMSLFSFIGSPRINATGQGVTIFYVDRLGYYPYIDSITGVTVNGGIPQKISLQDHLDKAKKDITFYMPVDNLGMAVIDWEEWRPTWARNWKPKDVYKNRSIELVQQQNVQLSLTEATEKAKQEFEKAGKDFLVETIKLGKLLRPNHLWGYYLFPDCYNHHYKKPGYNGSCFNVEIKRNDDLSWLWNESTALYPSIYLNTQQSPVAATLYVRNRVREAIRVSKIPDAKSPLPVFAYTRIVFTDQVLKFLSQDELVYTFGETVALGASGIVIWGTLSIMRSMKSCLLLDNYMETILNPYIINVTLAAKMCSQVLCQEQGVCIRKNWNSSDYLHLNPDNFAIQLEKGGKFTVRGKPTLEDLEQFSEKFYCSCYSTLSCKEKADVKDTDAVDVCIADGVCIDAFLKPPMETEEPQIFY

SEQ ID NO: 151 - protein, 447 aa, Artificial Sequence
  Mature PH20 36-482 with R at a position corresponding to amino acid residue 33
LNFRAPPVIPNVPFLWAWNAPSEFCLGKFDEPRDMSLFSFIGSPRINATGQGVTIFYVDRLGYYPYIDSITGVTVNGGIPQKISLQDHLDKAKKDITFYMPVDNLGMAVIDWEEWRPTWARNWKPKDVYKNRSIELVQQQNVQLSLTEATEKAKQEFEKAGKDFLVETIKLGKLLRPNHLWGYYLFPDCYNHHYKKPGYNGSCFNVEIKRNDDLSWLWNESTALYPSIYLNTQQSPVAATLYVRNRVREAIRVSKIPDAKSPLPVFAYTRIVFTDQVLKFLSQDELVYTFGETVALGASGIVIWGTLSIMRSMKSCLLLDNYMETILNPYIINVTLAAKMCSQVLCQEQGVCIRKNWNSSDYLHLNPDNFAIQLEKGGKFTVRGKPTLEDLEQFSEKFYCSCYSTLSCKEKADVKDTDAVDVCIADGVCIDAFLKPPMETEEPQIFY

SEQ ID NO: 152 - protein, 447 aa, Artificial Sequence
  Mature PH20 36-482 with R at a position corresponding to amino acid residue 154
LNFRAPPVIPNVPFLWAWNAPSEFCLGKFDEPLDMSLFSFIGSPRINATGQGVTIFYVDRLGYYPYIDSITGVTVNGGIPQKISLQDHLDKAKKDITFYMPVDNLGMAVIDWEEWRPTWARNWKPKDVYKNRSIELVQQQNVQLSLTEATEKARQEFEKAGKDFLVETIKLGKLLRPNHLWGYYLFPDCYNHHYKKPGYNGSCFNVEIKRNDDLSWLWNESTALYPSIYLNTQQSPVAATLYVRNRVREAIRVSKIPDAKSPLPVFAYTRIVFTDQVLKFLSQDELVYTFGETVALGASGIVIWGTLSIMRSMKSCLLLDNYMETILNPYIINVTLAAKMCSQVLCQEQGVCIRKNWNSSDYLHLNPDNFAIQLEKGGKFTVRGKPTLEDLEQFSEKFYCSCYSTLSCKEKADVKDTDAVDVCIADGVCIDAFLKPPMETEEPQIFY

SEQ ID NO: 153 - protein, 447 aa, Artificial Sequence
  Mature PH20 36-482 with E at a position corresponding to amino acid residue 97
LNFRAPPVIPNVPFLWAWNAPSEFCLGKFDEPLDMSLFSFIGSPRINATGQGVTIFYVDRLGYYPYIDSITGVTVNGGIPQKISLQDHLDKAKKDIEFYMPVDNLGMAVIDWEEWRPTWARNWKPKDVYKNRSIELVQQQNVQLSLTEATEKAKQEFEKAGKDFLVETIKLGKLLRPNHLWGYYLFPDCYNHHYKKPGYNGSCFNVEIKRNDDLSWLWNESTALYPSIYLNTQQSPVAATLYVRNRVREAIRVSKIPDAKSPLPVFAYTRIVFTDQVLKFLSQDELVYTFGETVALGASGIVIWGTLSIMRSMKSCLLLDNYMETILNPYIINVTLAAKMCSQVLCQEQGVCIRKNWNSSDYLHLNPDNFAIQLEKGGKFTVRGKPTLEDLEQFSEKFYCSCYSTLSCKEKADVKDTDAVDVCIADGVCIDAFLKPPMETEEPQIFY

SEQ ID NO: 154 - protein, 447 aa, Artificial Sequence
  Mature PH20 36-482 with W at a position corresponding to amino acid residue 33
LNFRAPPVIPNVPFLWAWNAPSEFCLGKFDEPWDMSLFSFIGSPRINATGQGVTIFYVDRLGYYPYIDSITGVTVNGGIPQKISLQDHLDKAKKDITFYMPVDNLGMAVIDWEEWRPTWARNWKPKDVYKNRSIELVQQQNVQLSLTEATEKAKQEFEKAGKDFLVETIKLGKLLRPNHLWGYYLFPDCYNHHYKKPGYNGSCFNVEIKRNDDLSWLWNESTALYPSIYLNTQQSPVAATLYVRNRVREAIRVSKIPDAKSPLPVFAYTRIVFTDQVLKFLSQDELVYTFGETVALGASGIVIWGTLSIMRSMKSCLLLDNYMETILNPYIINVTLAAKMCSQVLCQEQGVCIRKNWNSSDYLHLNPDNFAIQLEKGGKFTVRGKPTLEDLEQFSEKFYCSCYSTLSCKEKADVKDTDAVDVCIADGVCIDAFLKPPMETEEPQIFY

SEQ ID NO: 155 - protein, 447 aa, Artificial Sequence
  Mature PH20 36-482 with H at a position corresponding to amino acid residue 34
LNFRAPPVIPNVPFLWAWNAPSEFCLGKFDEPLHMSLFSFIGSPRINATGQGVTIFYVDRLGYYPYIDSITGVTVNGGIPQKISLQDHLDKAKKDITFYMPVDNLGMAVIDWEEWRPTWARNWKPKDVYKNRSIELVQQQNVQLSLTEATEKAKQEFEKAGKDFLVETIKLGKLLRPNHLWGYYLFPDCYNHHYKKPGYNGSCFNVEIKRNDDLSWLWNESTALYPSIYLNTQQSPVAATLYVRNRVREAIRVSKIPDAKSPLPVFAYTRIVFTDQVLKFLSQDELVYTFGETVALGASGIVIWGTLSIMRSMKSCLLLDNYMETILNPYIINVTLAAKMCSQVLCQEQGVCIRKNWNSSDYLHLNPDNFAIQLEKGGKFTVRGKPTLEDLEQFSEKFYCSCYSTLSCKEKADVKDTDAVDVCIADGVCIDAFLKPPMETEEPQIFY

SEQ ID NO: 156 - protein, 447 aa, Artificial Sequence
  Mature PH20 36-482 with M at a position corresponding to amino acid residue 285
LNFRAPPVIPNVPFLWAWNAPSEFCLGKFDEPLDMSLFSFIGSPRINATGQGVTIFYVDRLGYYPYIDSITGVTVNGGIPQKISLQDHLDKAKKDITFYMPVDNLGMAVIDWEEWRPTWARNWKPKDVYKNRSIELVQQQNVQLSLTEATEKAKQEFEKAGKDFLVETIKLGKLLRPNHLWGYYLFPDCYNHHYKKPGYNGSCFNVEIKRNDDLSWLWNESTALYPSIYLNTQQSPVAATLYVRNRVREAIRVSKIPDAKSPLPVFAYTRIVFTDQVLKFLSQDMLVYTFGETVALGASGIVIWGTLSIMRSMKSCLLLDNYMETILNPYIINVTLAAKMCSQVLCQEQGVCIRKNWNSSDYLHLNPDNFAIQLEKGGKFTVRGKPTLEDLEQFSEKFYCSCYSTLSCKEKADVKDTDAVDVCIADGVCIDAFLKPPMETEEPQIFY

SEQ ID NO: 157 - protein, 447 aa, Artificial Sequence
  Mature PH20 36-482 with N at a position corresponding to amino acid residue 305
LNFRAPPVIPNVPFLWAWNAPSEFCLGKFDEPLDMSLFSFIGSPRINATGQGVTIFYVDRLGYYPYIDSITGVTVNGGIPQKISLQDHLDKAKKDITFYMPVDNLGMAVIDWEEWRPTWARNWKPKDVYKNRSIELVQQQNVQLSLTEATEKAKQEFEKAGKDFLVETIKLGKLLRPNHLWGYYLFPDCYNHHYKKPGYNGSCFNVEIKRNDDLSWLWNESTALYPSIYLNTQQSPVAATLYVRNRVREAIRVSKIPDAKSPLPVFAYTRIVFTDQVLKFLSQDELVYTFGETVALGASGIVIWNTLSIMRSMKSCLLLDNYMETILNPYIINVTLAAKMCSQVLCQEQGVCIRKNWNSSDYLHLNPDNFAIQLEKGGKFTVRGKPTLEDLEQFSEKFYCSCYSTLSCKEKADVKDTDAVDVCIADGVCIDAFLKPPMETEEPQIFY

SEQ ID NO: 158 - protein, 447 aa, Artificial Sequence
  Mature PH20 36-482 with N at a position corresponding to amino acid residue 102
LNFRAPPVIPNVPFLWAWNAPSEFCLGKFDEPLDMSLFSFIGSPRINATGQGVTIFYVDRLGYYPYIDSITGVTVNGGIPQKISLQDHLDKAKKDITFYMPNDNLGMAVIDWEEWRPTWARNWKPKDVYKNRSIELVQQQNVQLSLTEATEKAKQEFEKAGKDFLVETIKLGKLLRPNHLWGYYLFPDCYNHHYKKPGYNGSCFNVEIKRNDDLSWLWNESTALYPSIYLNTQQSPVAATLYVRNRVREAIRVSKIPDAKSPLPVFAYTRIVFTDQVLKFLSQDELVYTFGETVALGASGIVIWGTLSIMRSMKSCLLLDNYMETILNPYIINVTLAAKMCSQVLCQEQGVCIRKNWNSSDYLHLNPDNFAIQLEKGGKFTVRGKPTLEDLEQFSEKFYCSCYSTLSCKEKADVKDTDAVDVCIADGVCIDAFLKPPMETEEPQIFY

SEQ ID NO: 159 - protein, 447 aa, Artificial Sequence
  Mature PH20 36-482 with I at a position corresponding to amino acid residue 105
LNFRAPPVIPNVPFLWAWNAPSEFCLGKFDEPLDMSLFSFIGSPRINATGQGVTIFYVDRLGYYPYIDSITGVTVNGGIPQKISLQDHLDKAKKDITFYMPVDNIGMAVIDWEEWRPTWARNWKPKDVYKNRSIELVQQQNVQLSLTEATEKAKQEFEKAGKDFLVETIKLGKLLRPNHLWGYYLFPDCYNHHYKKPGYNGSCFNVEIKRNDDLSWLWNESTALYPSIYLNTQQSPVAATLYVRNRVREAIRVSKIPDAKSPLPVFAYTRIVFTDQVLKFLSQDELVYTFGETVALGASGIVIWGTLSIMRSMKSCLLLDNYMETILNPYIINVTLAAKMCSQVLCQEQGVCIRKNWNSSDYLHLNPDNFAIQLEKGGKFTVRGKPTLEDLEQFSEKFYCSCYSTLSCKEKADVKDTDAVDVCIADGVCIDAFLKPPMETEEPQIFY

SEQ ID NO: 160 - protein, 447 aa, Artificial Sequence
  Mature PH20 36-482 with R at a position corresponding to amino acid residue 105
LNFRAPPVIPNVPFLWAWNAPSEFCLGKFDEPLDMSLFSFIGSPRINATGQGVTIFYVDRLGYYPYIDSITGVTVNGGIPQKISLQDHLDKAKKDITFYMPVDNRGMAVIDWEEWRPTWARNWKPKDVYKNRSIELVQQQNVQLSLTEATEKAKQEFEKAGKDFLVETIKLGKLLRPNHLWGYYLFPDCYNHHYKKPGYNGSCFNVEIKRNDDLSWLWNESTALYPSIYLNTQQSPVAATLYVRNRVREAIRVSKIPDAKSPLPVFAYTRIVFTDQVLKFLSQDELVYTFGETVALGASGIVIWGTLSIMRSMKSCLLLDNYMETILNPYIINVTLAAKMCSQVLCQEQGVCIRKNWNSSDYLHLNPDNFAIQLEKGGKFTVRGKPTLEDLEQFSEKFYCSCYSTLSCKEKADVKDTDAVDVCIADGVCIDAFLKPPMETEEPQIFY

SEQ ID NO: 161 - protein, 447 aa, Artificial Sequence
  Mature PH20 36-482 with W at a position corresponding to amino acid residue 105
LNFRAPPVIPNVPFLWAWNAPSEFCLGKFDEPLDMSLFSFIGSPRINATGQGVTIFYVDRLGYYPYIDSITGVTVNGGIPQKISLQDHLDKAKKDITFYMPVDNWGMAVIDWEEWRPTWARNWKPKDVYKNRSIELVQQQNVQLSLTEATEKAKQEFEKAGKDFLVETIKLGKLLRPNHLWGYYLFPDCYNHHYKKPGYNGSCFNVEIKRNDDLSWLWNESTALYPSIYLNTQQSPVAATLYVRNRVREAIRVSKIPDAKSPLPVFAYTRIVFTDQVLKFLSQDELVYTFGETVALGASGIVIWGTLSIMRSMKSCLLLDNYMETILNPYIINVTLAAKMCSQVLCQEQGVCIRKNWNSSDYLHLNPDNFAIQLEKGGKFTVRGKPTLEDLEQFSEKFYCSCYSTLSCKEKADVKDTDAVDVCIADGVCIDAFLKPPMETEEPQIFY

SEQ ID NO: 162 - protein, 447 aa, Artificial Sequence
  Mature PH20 36-482 with L at a position corresponding to amino acid residue 198
LNFRAPPVIPNVPFLWAWNAPSEFCLGKFDEPLDMSLFSFIGSPRINATGQGVTIFYVDRLGYYPYIDSITGVTVNGGIPQKISLQDHLDKAKKDITFYMPVDNLGMAVIDWEEWRPTWARNWKPKDVYKNRSIELVQQQNVQLSLTEATEKAKQEFEKAGKDFLVETIKLGKLLRPNHLWGYYLFPDCYNHHYKKPLYNGSCFNVEIKRNDDLSWLWNESTALYPSIYLNTQQSPVAATLYVRNRVREAIRVSKIPDAKSPLPVFAYTRIVFTDQVLKFLSQDELVYTFGETVALGASGIVIWGTLSIMRSMKSCLLLDNYMETILNPYIINVTLAAKMCSQVLCQEQGVCIRKNWNSSDYLHLNPDNFAIQLEKGGKFTVRGKPTLEDLEQFSEKFYCSCYSTLSCKEKADVKDTDAVDVCIADGVCIDAFLKPPMETEEPQIFY

SEQ ID NO: 163 - protein, 447 aa, Artificial Sequence
  Mature PH20 36-482 with M at a position corresponding to amino acid residue 141
LNFRAPPVIPNVPFLWAWNAPSEFCLGKFDEPLDMSLFSFIGSPRINATGQGVTIFYVDRLGYYPYIDSITGVTVNGGIPQKISLQDHLDKAKKDITFYMPVDNLGMAVIDWEEWRPTWARNWKPKDVYKNRSIELVQQQMVQLSLTEATEKAKQEFEKAGKDFLVETIKLGKLLRPNHLWGYYLFPDCYNHHYKKPGYNGSCFNVEIKRNDDLSWLWNESTALYPSIYLNTQQSPVAATLYVRNRVREAIRVSKIPDAKSPLPVFAYTRIVFTDQVLKFLSQDELVYTFGETVALGASGIVIWGTLSIMRSMKSCLLLDNYMETILNPYIINVTLAAKMCSQVLCQEQGVCIRKNWNSSDYLHLNPDNFAIQLEKGGKFTVRGKPTLEDLEQFSEKFYCSCYSTLSCKEKADVKDTDAVDVCIADGVCIDAFLKPPMETEEPQIFY

SEQ ID NO: 164 - protein, 447 aa, Artificial Sequence
  Mature PH20 36-482 with Y at a position corresponding to amino acid residue 141
LNFRAPPVIPNVPFLWAWNAPSEFCLGKFDEPLDMSLFSFIGSPRINATGQGVTIFYVDRLGYYPYIDSITGVTVNGGIPQKISLQDHLDKAKKDITFYMPVDNLGMAVIDWEEWRPTWARNWKPKDVYKNRSIELVQQQYVQLSLTEATEKAKQEFEKAGKDFLVETIKLGKLLRPNHLWGYYLFPDCYNHHYKKPGYNGSCFNVEIKRNDDLSWLWNESTALYPSIYLNTQQSPVAATLYVRNRVREAIRVSKIPDAKSPLPVFAYTRIVFTDQVLKFLSQDELVYTFGETVALGASGIVIWGTLSIMRSMKSCLLLDNYMETILNPYIINVTLAAKMCSQVLCQEQGVCIRKNWNSSDYLHLNPDNFAIQLEKGGKFTVRGKPTLEDLEQFSEKFYCSCYSTLSCKEKADVKDTDAVDVCIADGVCIDAFLKPPMETEEPQIFY

SEQ ID NO: 165 - protein, 447 aa, Artificial Sequence
  Mature PH20 36-482 with F at a position corresponding to amino acid residue 97
LNFRAPPVIPNVPFLWAWNAPSEFCLGKFDEPLDMSLFSFIGSPRINATGQGVTIFYVDRLGYYPYIDSITGVTVNGGIPQKISLQDHLDKAKKDIFFYMPVDNLGMAVIDWEEWRPTWARNWKPKDVYKNRSIELVQQQNVQLSLTEATEKAKQEFEKAGKDFLVETIKLGKLLRPNHLWGYYLFPDCYNHHYKKPGYNGSCFNVEIKRNDDLSWLWNESTALYPSIYLNTQQSPVAATLYVRNRVREAIRVSKIPDAKSPLPVFAYTRIVFTDQVLKFLSQDELVYTFGETVALGASGIVIWGTLSIMRSMKSCLLLDNYMETILNPYIINVTLAAKMCSQVLCQEQGVCIRKNWNSSDYLHLNPDNFAIQLEKGGKFTVRGKPTLEDLEQFSEKFYCSCYSTLSCKEKADVKDTDAVDVCIADGVCIDAFLKPPMETEEPQIFY

SEQ ID NO: 166 - protein, 447 aa, Artificial Sequence
  Mature PH20 36-482 with D at a position corresponding to amino acid residue 41
LNFRAPPVIPNVPFLWAWNAPSEFCLGKFDEPLDMSLFSFDGSPRINATGQGVTIFYVDRLGYYPYIDSITGVTVNGGIPQKISLQDHLDKAKKDITFYMPVDNLGMAVIDWEEWRPTWARNWKPKDVYKNRSIELVQQQNVQLSLTEATEKAKQEFEKAGKDFLVETIKLGKLLRPNHLWGYYLFPDCYNHHYKKPGYNGSCFNVEIKRNDDLSWLWNESTALYPSIYLNTQQSPVAATLYVRNRVREAIRVSKIPDAKSPLPVFAYTRIVFTDQVLKFLSQDELVYTFGETVALGASGIVIWGTLSIMRSMKSCLLLDNYMETILNPYIINVTLAAKMCSQVLCQEQGVCIRKNWNSSDYLHLNPDNFAIQLEKGGKFTVRGKPTLEDLEQFSEKFYCSCYSTLSCKEKADVKDTDAVDVCIADGVCIDAFLKPPMETEEPQIFY

SEQ ID NO: 167 - protein, 447 aa, Artificial Sequence
  Mature PH20 36-482 with T at a position corresponding to amino acid residue 41
LNFRAPPVIPNVPFLWAWNAPSEFCLGKFDEPLDMSLFSFTGSPRINATGQGVTIFYVDRLGYYPYIDSITGVTVNGGIPQKISLQDHLDKAKKDITFYMPVDNLGMAVIDWEEWRPTWARNWKPKDVYKNRSIELVQQQNVQLSLTEATEKAKQEFEKAGKDFLVETIKLGKLLRPNHLWGYYLFPDCYNHHYKKPGYNGSCFNVEIKRNDDLSWLWNESTALYPSIYLNTQQSPVAATLYVRNRVREAIRVSKIPDAKSPLPVFAYTRIVFTDQVLKFLSQDELVYTFGETVALGASGIVIWGTLSIMRSMKSCLLLDNYMETILNPYIINVTLAAKMCSQVLCQEQGVCIRKNWNSSDYLHLNPDNFAIQLEKGGKFTVRGKPTLEDLEQFSEKFYCSCYSTLSCKEKADVKDTDAVDVCIADGVCIDAFLKPPMETEEPQIFY

SEQ ID NO: 168 - protein, 447 aa, Artificial Sequence
  Mature PH20 36-482 with C at a position corresponding to amino acid residue 132
LNFRAPPVIPNVPFLWAWNAPSEFCLGKFDEPLDMSLFSFIGSPRINATGQGVTIFYVDRLGYYPYIDSITGVTVNGGIPQKISLQDHLDKAKKDITFYMPVDNLGMAVIDWEEWRPTWARNWKPKDVYKNCSIELVQQQNVQLSLTEATEKAKQEFEKAGKDFLVETIKLGKLLRPNHLWGYYLFPDCYNHHYKKPGYNGSCFNVEIKRNDDLSWLWNESTALYPSIYLNTQQSPVAATLYVRNRVREAIRVSKIPDAKSPLPVFAYTRIVFTDQVLKFLSQDELVYTFGETVALGASGIVIWGTLSIMRSMKSCLLLDNYMETILNPYIINVTLAAKMCSQVLCQEQGVCIRKNWNSSDYLHLNPDNFAIQLEKGGKFTVRGKPTLEDLEQFSEKFYCSCYSTLSCKEKADVKDTDAVDVCIADGVCIDAFLKPPMETEEPQIFY

SEQ ID NO: 169 - protein, 447 aa, Artificial Sequence
  Mature PH20 36-482 with Q at a position corresponding to amino acid residue 135
LNFRAPPVIPNVPFLWAWNAPSEFCLGKFDEPLDMSLFSFIGSPRINATGQGVTIFYVDRLGYYPYIDSITGVTVNGGIPQKISLQDHLDKAKKDITFYMPVDNLGMAVIDWEEWRPTWARNWKPKDVYKNRSIQLVQQQNVQLSLTEATEKAKQEFEKAGKDFLVETIKLGKLLRPNHLWGYYLFPDCYNHHYKKPGYNGSCFNVEIKRNDDLSWLWNESTALYPSIYLNTQQSPVAATLYVRNRVREAIRVSKIPDAKSPLPVFAYTRIVFTDQVLKFLSQDELVYTFGETVALGASGIVIWGTLSIMRSMKSCLLLDNYMETILNPYIINVTLAAKMCSQVLCQEQGVCIRKNWNSSDYLHLNPDNFAIQLEKGGKFTVRGKPTLEDLEQFSEKFYCSCYSTLSCKEKADVKDTDAVDVCIADGVCIDAFLKPPMETEEPQIFY

SEQ ID NO: 170 - protein, 447 aa, Artificial Sequence
  Mature PH20 36-482 with A at a position corresponding to amino acid residue 438
LNFRAPPVIPNVPFLWAWNAPSEFCLGKFDEPLDMSLFSFIGSPRINATGQGVTIFYVDRLGYYPYIDSITGVTVNGGIPQKISLQDHLDKAKKDITFYMPVDNLGMAVIDWEEWRPTWARNWKPKDVYKNRSIELVQQQNVQLSLTEATEKAKQEFEKAGKDFLVETIKLGKLLRPNHLWGYYLFPDCYNHHYKKPGYNGSCFNVEIKRNDDLSWLWNESTALYPSIYLNTQQSPVAATLYVRNRVREAIRVSKIPDAKSPLPVFAYTRIVFTDQVLKFLSQDELVYTFGETVALGASGIVIWGTLSIMRSMKSCLLLDNYMETILNPYIINVTLAAKMCSQVLCQEQGVCIRKNWNSSDYLHLNPDNFAIQLEKGGKFTVRGKPTLEDLEQFSEKFYCSCYSTLSCKEKADVKDTDAVDVCIADGVCIDAFLKPPAETEEPQIFY

SEQ ID NO: 171 - protein, 447 aa, Artificial Sequence
  Mature PH20 36-482 with F at a position corresponding to amino acid residue 165
LNFRAPPVIPNVPFLWAWNAPSEFCLGKFDEPLDMSLFSFIGSPRINATGQGVTIFYVDRLGYYPYIDSITGVTVNGGIPQKISLQDHLDKAKKDITFYMPVDNLGMAVIDWEEWRPTWARNWKPKDVYKNRSIELVQQQNVQLSLTEATEKAKQEFEKAGKDFFVETIKLGKLLRPNHLWGYYLFPDCYNHHYKKPGYNGSCFNVEIKRNDDLSWLWNESTALYPSIYLNTQQSPVAATLYVRNRVREAIRVSKIPDAKSPLPVFAYTRIVFTDQVLKFLSQDELVYTFGETVALGASGIVIWGTLSIMRSMKSCLLLDNYMETILNPYIINVTLAAKMCSQVLCQEQGVCIRKNWNSSDYLHLNPDNFAIQLEKGGKFTVRGKPTLEDLEQFSEKFYCSCYSTLSCKEKADVKDTDAVDVCIADGVCIDAFLKPPMETEEPQIFY

SEQ ID NO: 172 - protein, 447 aa, Artificial Sequence
  Mature PH20 36-482 with L at a position corresponding to amino acid residue 251
LNFRAPPVIPNVPFLWAWNAPSEFCLGKFDEPLDMSLFSFIGSPRINATGQGVTIFYVDRLGYYPYIDSITGVTVNGGIPQKISLQDHLDKAKKDITFYMPVDNLGMAVIDWEEWRPTWARNWKPKDVYKNRSIELVQQQNVQLSLTEATEKAKQEFEKAGKDFLVETIKLGKLLRPNHLWGYYLFPDCYNHHYKKPGYNGSCFNVEIKRNDDLSWLWNESTALYPSIYLNTQQSPVAATLYVRNRVREALRVSKIPDAKSPLPVFAYTRIVFTDQVLKFLSQDELVYTFGETVALGASGIVIWGTLSIMRSMKSCLLLDNYMETILNPYIINVTLAAKMCSQVLCQEQGVCIRKNWNSSDYLHLNPDNFAIQLEKGGKFTVRGKPTLEDLEQFSEKFYCSCYSTLSCKEKADVKDTDAVDVCIADGVCIDAFLKPPMETEEPQIFY

SEQ ID NO: 173 - protein, 447 aa, Artificial Sequence
  Mature PH20 36-482 with A at a position corresponding to amino acid residue 205
LNFRAPPVIPNVPFLWAWNAPSEFCLGKFDEPLDMSLFSFIGSPRINATGQGVTIFYVDRLGYYPYIDSITGVTVNGGIPQKISLQDHLDKAKKDITFYMPVDNLGMAVIDWEEWRPTWARNWKPKDVYKNRSIELVQQQNVQLSLTEATEKAKQEFEKAGKDFLVETIKLGKLLRPNHLWGYYLFPDCYNHHYKKPGYNGSCFAVEIKRNDDLSWLWNESTALYPSIYLNTQQSPVAATLYVRNRVREAIRVSKIPDAKSPLPVFAYTRIVFTDQVLKFLSQDELVYTFGETVALGASGIVIWGTLSIMRSMKSCLLLDNYMETILNPYIINVTLAAKMCSQVLCQEQGVCIRKNWNSSDYLHLNPDNFAIQLEKGGKFTVRGKPTLEDLEQFSEKFYCSCYSTLSCKEKADVKDTDAVDVCIADGVCIDAFLKPPMETEEPQIFY

SEQ ID NO: 174 - protein, 447 aa, Artificial Sequence
  Mature PH20 36-482 with Q at a position corresponding to amino acid residue 141
LNFRAPPVIPNVPFLWAWNAPSEFCLGKFDEPLDMSLFSFIGSPRINATGQGVTIFYVDRLGYYPYIDSITGVTVNGGIPQKISLQDHLDKAKKDITFYMPVDNLGMAVIDWEEWRPTWARNWKPKDVYKNRSIELVQQQQVQLSLTEATEKAKQEFEKAGKDFLVETIKLGKLLRPNHLWGYYLFPDCYNHHYKKPGYNGSCFNVEIKRNDDLSWLWNESTALYPSIYLNTQQSPVAATLYVRNRVREAIRVSKIPDAKSPLPVFAYTRIVFTDQVLKFLSQDELVYTFGETVALGASGIVIWGTLSIMRSMKSCLLLDNYMETILNPYIINVTLAAKMCSQVLCQEQGVCIRKNWNSSDYLHLNPDNFAIQLEKGGKFTVRGKPTLEDLEQFSEKFYCSCYSTLSCKEKADVKDTDAVDVCIADGVCIDAFLKPPMETEEPQIFY

SEQ ID NO: 175 - protein, 447 aa, Artificial Sequence
  Mature PH20 36-482 with W at a position corresponding to amino acid residue 141
LNFRAPPVIPNVPFLWAWNAPSEFCLGKFDEPLDMSLFSFIGSPRINATGQGVTIFYVDRLGYYPYIDSITGVTVNGGIPQKISLQDHLDKAKKDITFYMPVDNLGMAVIDWEEWRPTWARNWKPKDVYKNRSIELVQQQWVQLSLTEATEKAKQEFEKAGKDFLVETIKLGKLLRPNHLWGYYLFPDCYNHHYKKPGYNGSCFNVEIKRNDDLSWLWNESTALYPSIYLNTQQSPVAATLYVRNRVREAIRVSKIPDAKSPLPVFAYTRIVFTDQVLKFLSQDELVYTFGETVALGASGIVIWGTLSIMRSMKSCLLLDNYMETILNPYIINVTLAAKMCSQVLCQEQGVCIRKNWNSSDYLHLNPDNFAIQLEKGGKFTVRGKPTLEDLEQFSEKFYCSCYSTLSCKEKADVKDTDAVDVCIADGVCIDAFLKPPMETEEPQIFY

SEQ ID NO: 176 - protein, 447 aa, Artificial Sequence
  Mature PH20 36-482 with T at a position corresponding to amino acid residue 441
LNFRAPPVIPNVPFLWAWNAPSEFCLGKFDEPLDMSLFSFIGSPRINATGQGVTIFYVDRLGYYPYIDSITGVTVNGGIPQKISLQDHLDKAKKDITFYMPVDNLGMAVIDWEEWRPTWARNWKPKDVYKNRSIELVQQQNVQLSLTEATEKAKQEFEKAGKDFLVETIKLGKLLRPNHLWGYYLFPDCYNHHYKKPGYNGSCFNVEIKRNDDLSWLWNESTALYPSIYLNTQQSPVAATLYVRNRVREAIRVSKIPDAKSPLPVFAYTRIVFTDQVLKFLSQDELVYTFGETVALGASGIVIWGTLSIMRSMKSCLLLDNYMETILNPYIINVTLAAKMCSQVLCQEQGVCIRKNWNSSDYLHLNPDNFAIQLEKGGKFTVRGKPTLEDLEQFSEKFYCSCYSTLSCKEKADVKDTDAVDVCIADGVCIDAFLKPPMETTEPQIFY

SEQ ID NO: 177 - protein, 447 aa, Artificial Sequence
  Mature PH20 36-482 with Q at a position corresponding to amino acid residue 142
LNFRAPPVIPNVPFLWAWNAPSEFCLGKFDEPLDMSLFSFIGSPRINATGQGVTIFYVDRLGYYPYIDSITGVTVNGGIPQKISLQDHLDKAKKDITFYMPVDNLGMAVIDWEEWRPTWARNWKPKDVYKNRSIELVQQQNQQLSLTEATEKAKQEFEKAGKDFLVETIKLGKLLRPNHLWGYYLFPDCYNHHYKKPGYNGSCFNVEIKRNDDLSWLWNESTALYPSIYLNTQQSPVAATLYVRNRVREAIRVSKIPDAKSPLPVFAYTRIVFTDQVLKFLSQDELVYTFGETVALGASGIVIWGTLSIMRSMKSCLLLDNYMETILNPYIINVTLAAKMCSQVLCQEQGVCIRKNWNSSDYLHLNPDNFAIQLEKGGKFTVRGKPTLEDLEQFSEKFYCSCYSTLSCKEKADVKDTDAVDVCIADGVCIDAFLKPPMETEEPQIFY

SEQ ID NO: 178 - protein, 447 aa, Artificial Sequence
  Mature PH20 36-482 with T at a position corresponding to amino acid residue 379
LNFRAPPVIPNVPFLWAWNAPSEFCLGKFDEPLDMSLFSFIGSPRINATGQGVTIFYVDRLGYYPYIDSITGVTVNGGIPQKISLQDHLDKAKKDITFYMPVDNLGMAVIDWEEWRPTWARNWKPKDVYKNRSIELVQQQNVQLSLTEATEKAKQEFEKAGKDFLVETIKLGKLLRPNHLWGYYLFPDCYNHHYKKPGYNGSCFNVEIKRNDDLSWLWNESTALYPSIYLNTQQSPVAATLYVRNRVREAIRVSKIPDAKSPLPVFAYTRIVFTDQVLKFLSQDELVYTFGETVALGASGIVIWGTLSIMRSMKSCLLLDNYMETILNPYIINVTLAAKMCSQVLCQEQGVCIRKNWNSSDYLHLNPDNFAIQLEKGGTFTVRGKPTLEDLEQFSEKFYCSCYSTLSCKEKADVKDTDAVDVCIADGVCIDAFLKPPMETEEPQIFY

SEQ ID NO: 179 - protein, 447 aa, Artificial Sequence
  Mature PH20 36-482 with F at a position corresponding to amino acid residue 261
LNFRAPPVIPNVPFLWAWNAPSEFCLGKFDEPLDMSLFSFIGSPRINATGQGVTIFYVDRLGYYPYIDSITGVTVNGGIPQKISLQDHLDKAKKDITFYMPVDNLGMAVIDWEEWRPTWARNWKPKDVYKNRSIELVQQQNVQLSLTEATEKAKQEFEKAGKDFLVETIKLGKLLRPNHLWGYYLFPDCYNHHYKKPGYNGSCFNVEIKRNDDLSWLWNESTALYPSIYLNTQQSPVAATLYVRNRVREAIRVSKIPDAKFPLPVFAYTRIVFTDQVLKFLSQDELVYTFGETVALGASGIVIWGTLSIMRSMKSCLLLDNYMETILNPYIINVTLAAKMCSQVLCQEQGVCIRKNWNSSDYLHLNPDNFAIQLEKGGKFTVRGKPTLEDLEQFSEKFYCSCYSTLSCKEKADVKDTDAVDVCIADGVCIDAFLKPPMETEEPQIFY

SEQ ID NO: 180 - protein, 447 aa, Artificial Sequence
  Mature PH20 36-482 with R at a position corresponding to amino acid residue 163
LNFRAPPVIPNVPFLWAWNAPSEFCLGKFDEPLDMSLFSFIGSPRINATGQGVTIFYVDRLGYYPYIDSITGVTVNGGIPQKISLQDHLDKAKKDITFYMPVDNLGMAVIDWEEWRPTWARNWKPKDVYKNRSIELVQQQNVQLSLTEATEKAKQEFEKAGKRFLVETIKLGKLLRPNHLWGYYLFPDCYNHHYKKPGYNGSCFNVEIKRNDDLSWLWNESTALYPSIYLNTQQSPVAATLYVRNRVREAIRVSKIPDAKSPLPVFAYTRIVFTDQVLKFLSQDELVYTFGETVALGASGIVIWGTLSIMRSMKSCLLLDNYMETILNPYIINVTLAAKMCSQVLCQEQGVCIRKNWNSSDYLHLNPDNFAIQLEKGGKFTVRGKPTLEDLEQFSEKFYCSCYSTLSCKEKADVKDTDAVDVCIADGVCIDAFLKPPMETEEPQIFY

SEQ ID NO: 181 - protein, 447 aa, Artificial Sequence
  Mature PH20 36-482 with G at a position corresponding to amino acid residue 147
LNFRAPPVIPNVPFLWAWNAPSEFCLGKFDEPLDMSLFSFIGSPRINATGQGVTIFYVDRLGYYPYIDSITGVTVNGGIPQKISLQDHLDKAKKDITFYMPVDNLGMAVIDWEEWRPTWARNWKPKDVYKNRSIELVQQQNVQLSLGEATEKAKQEFEKAGKDFLVETIKLGKLLRPNHLWGYYLFPDCYNHHYKKPGYNGSCFNVEIKRNDDLSWLWNESTALYPSIYLNTQQSPVAATLYVRNRVREAIRVSKIPDAKSPLPVFAYTRIVFTDQVLKFLSQDELVYTFGETVALGASGIVIWGTLSIMRSMKSCLLLDNYMETILNPYIINVTLAAKMCSQVLCQEQGVCIRKNWNSSDYLHLNPDNFAIQLEKGGKFTVRGKPTLEDLEQFSEKFYCSCYSTLSCKEKADVKDTDAVDVCIADGVCIDAFLKPPMETEEPQIFY

SEQ ID NO: 182 - protein, 447 aa, Artificial Sequence
  Mature PH20 36-482 with E at a position corresponding to amino acid residue 34
LNFRAPPVIPNVPFLWAWNAPSEFCLGKFDEPLEMSLFSFIGSPRINATGQGVTIFYVDRLGYYPYIDSITGVTVNGGIPQKISLQDHLDKAKKDITFYMPVDNLGMAVIDWEEWRPTWARNWKPKDVYKNRSIELVQQQNVQLSLTEATEKAKQEFEKAGKDFLVETIKLGKLLRPNHLWGYYLFPDCYNHHYKKPGYNGSCFNVEIKRNDDLSWLWNESTALYPSIYLNTQQSPVAATLYVRNRVREAIRVSKIPDAKSPLPVFAYTRIVFTDQVLKFLSQDELVYTFGETVALGASGIVIWGTLSIMRSMKSCLLLDNYMETILNPYIINVTLAAKMCSQVLCQEQGVCIRKNWNSSDYLHLNPDNFAIQLEKGGKFTVRGKPTLEDLEQFSEKFYCSCYSTLSCKEKADVKDTDAVDVCIADGVCIDAFLKPPMETEEPQIFY

SEQ ID NO: 183 - protein, 447 aa, Artificial Sequence
  Mature PH20 36-482 with I at a position corresponding to amino acid residue 147
LNFRAPPVIPNVPFLWAWNAPSEFCLGKFDEPLDMSLFSFIGSPRINATGQGVTIFYVDRLGYYPYIDSITGVTVNGGIPQKISLQDHLDKAKKDITFYMPVDNLGMAVIDWEEWRPTWARNWKPKDVYKNRSIELVQQQNVQLSLIEATEKAKQEFEKAGKDFLVETIKLGKLLRPNHLWGYYLFPDCYNHHYKKPGYNGSCFNVEIKRNDDLSWLWNESTALYPSIYLNTQQSPVAATLYVRNRVREAIRVSKIPDAKSPLPVFAYTRIVFTDQVLKFLSQDELVYTFGETVALGASGIVIWGTLSIMRSMKSCLLLDNYMETILNPYIINVTLAAKMCSQVLCQEQGVCIRKNWNSSDYLHLNPDNFAIQLEKGGKFTVRGKPTLEDLEQFSEKFYCSCYSTLSCKEKADVKDTDAVDVCIADGVCIDAFLKPPMETEEPQIFY

SEQ ID NO: 184 - protein, 447 aa, Artificial Sequence
  Mature PH20 36-482 with V at a position corresponding to amino acid residue 292
LNFRAPPVIPNVPFLWAWNAPSEFCLGKFDEPLDMSLFSFIGSPRINATGQGVTIFYVDRLGYYPYIDSITGVTVNGGIPQKISLQDHLDKAKKDITFYMPVDNLGMAVIDWEEWRPTWARNWKPKDVYKNRSIELVQQQNVQLSLTEATEKAKQEFEKAGKDFLVETIKLGKLLRPNHLWGYYLFPDCYNHHYKKPGYNGSCFNVEIKRNDDLSWLWNESTALYPSIYLNTQQSPVAATLYVRNRVREAIRVSKIPDAKSPLPVFAYTRIVFTDQVLKFLSQDELVYTFGVTVALGASGIVIWGTLSIMRSMKSCLLLDNYMETILNPYIINVTLAAKMCSQVLCQEQGVCIRKNWNSSDYLHLNPDNFAIQLEKGGKFTVRGKPTLEDLEQFSEKFYCSCYSTLSCKEKADVKDTDAVDVCIADGVCIDAFLKPPMETEEPQIFY

SEQ ID NO: 185 - protein, 447 aa, Artificial Sequence
  Mature PH20 36-482 with E at a position corresponding to amino acid residue 447
LNFRAPPVIPNVPFLWAWNAPSEFCLGKFDEPLDMSLFSFIGSPRINATGQGVTIFYVDRLGYYPYIDSITGVTVNGGIPQKISLQDHLDKAKKDITFYMPVDNLGMAVIDWEEWRPTWARNWKPKDVYKNRSIELVQQQNVQLSLTEATEKAKQEFEKAGKDFLVETIKLGKLLRPNHLWGYYLFPDCYNHHYKKPGYNGSCFNVEIKRNDDLSWLWNESTALYPSIYLNTQQSPVAATLYVRNRVREAIRVSKIPDAKSPLPVFAYTRIVFTDQVLKFLSQDELVYTFGETVALGASGIVIWGTLSIMRSMKSCLLLDNYMETILNPYIINVTLAAKMCSQVLCQEQGVCIRKNWNSSDYLHLNPDNFAIQLEKGGKFTVRGKPTLEDLEQFSEKFYCSCYSTLSCKEKADVKDTDAVDVCIADGVCIDAFLKPPMETEEPQIFE

SEQ ID NO: 186 - protein, 447 aa, Artificial Sequence
  Mature PH20 36-482 with N at a position corresponding to amino acid residue 213
LNFRAPPVIPNVPFLWAWNAPSEFCLGKFDEPLDMSLFSFIGSPRINATGQGVTIFYVDRLGYYPYIDSITGVTVNGGIPQKISLQDHLDKAKKDITFYMPVDNLGMAVIDWEEWRPTWARNWKPKDVYKNRSIELVQQQNVQLSLTEATEKAKQEFEKAGKDFLVETIKLGKLLRPNHLWGYYLFPDCYNHHYKKPGYNGSCFNVEIKRNDNLSWLWNESTALYPSIYLNTQQSPVAATLYVRNRVREAIRVSKIPDAKSPLPVFAYTRIVFTDQVLKFLSQDELVYTFGETVALGASGIVIWGTLSIMRSMKSCLLLDNYMETILNPYIINVTLAAKMCSQVLCQEQGVCIRKNWNSSDYLHLNPDNFAIQLEKGGKFTVRGKPTLEDLEQFSEKFYCSCYSTLSCKEKADVKDTDAVDVCIADGVCIDAFLKPPMETEEPQIFY

SEQ ID NO: 187 - protein, 447 aa, Artificial Sequence
  Mature PH20 36-482 with S at a position corresponding to amino acid residue 379
LNFRAPPVIPNVPFLWAWNAPSEFCLGKFDEPLDMSLFSFIGSPRINATGQGVTIFYVDRLGYYPYIDSITGVTVNGGIPQKISLQDHLDKAKKDITFYMPVDNLGMAVIDWEEWRPTWARNWKPKDVYKNRSIELVQQQNVQLSLTEATEKAKQEFEKAGKDFLVETIKLGKLLRPNHLWGYYLFPDCYNHHYKKPGYNGSCFNVEIKRNDDLSWLWNESTALYPSIYLNTQQSPVAATLYVRNRVREAIRVSKIPDAKSPLPVFAYTRIVFTDQVLKFLSQDELVYTFGETVALGASGIVIWGTLSIMRSMKSCLLLDNYMETILNPYIINVTLAAKMCSQVLCQEQGVCIRKNWNSSDYLHLNPDNFAIQLEKGGSFTVRGKPTLEDLEQFSEKFYCSCYSTLSCKEKADVKDTDAVDVCIADGVCIDAFLKPPMETEEPQIFY

SEQ ID NO: 188 - protein, 447 aa, Artificial Sequence
  Mature PH20 36-482 with Y at a position corresponding to amino acid residue 38
LNFRAPPVIPNVPFLWAWNAPSEFCLGKFDEPLDMSLYSFIGSPRINATGQGVTIFYVDRLGYYPYIDSITGVTVNGGIPQKISLQDHLDKAKKDITFYMPVDNLGMAVIDWEEWRPTWARNWKPKDVYKNRSIELVQQQNVQLSLTEATEKAKQEFEKAGKDFLVETIKLGKLLRPNHLWGYYLFPDCYNHHYKKPGYNGSCFNVEIKRNDDLSWLWNESTALYPSIYLNTQQSPVAATLYVRNRVREAIRVSKIPDAKSPLPVFAYTRIVFTDQVLKFLSQDELVYTFGETVALGASGIVIWGTLSIMRSMKSCLLLDNYMETILNPYIINVTLAAKMCSQVLCQEQGVCIRKNWNSSDYLHLNPDNFAIQLEKGGKFTVRGKPTLEDLEQFSEKFYCSCYSTLSCKEKADVKDTDAVDVCIADGVCIDAFLKPPMETEEPQIFY

SEQ ID NO: 189 - protein, 447 aa, Artificial Sequence
  Mature PH20 36-482 with A at a position corresponding to amino acid residue 152
LNFRAPPVIPNVPFLWAWNAPSEFCLGKFDEPLDMSLFSFIGSPRINATGQGVTIFYVDRLGYYPYIDSITGVTVNGGIPQKISLQDHLDKAKKDITFYMPVDNLGMAVIDWEEWRPTWARNWKPKDVYKNRSIELVQQQNVQLSLTEATEAAKQEFEKAGKDFLVETIKLGKLLRPNHLWGYYLFPDCYNHHYKKPGYNGSCFNVEIKRNDDLSWLWNESTALYPSIYLNTQQSPVAATLYVRNRVREAIRVSKIPDAKSPLPVFAYTRIVFTDQVLKFLSQDELVYTFGETVALGASGIVIWGTLSIMRSMKSCLLLDNYMETILNPYIINVTLAAKMCSQVLCQEQGVCIRKNWNSSDYLHLNPDNFAIQLEKGGKFTVRGKPTLEDLEQFSEKFYCSCYSTLSCKEKADVKDTDAVDVCIADGVCIDAFLKPPMETEEPQIFY

SEQ ID NO: 190 - protein, 447 aa, Artificial Sequence
  Mature PH20 36-482 with Q at a position corresponding to amino acid residue 240
LNFRAPPVIPNVPFLWAWNAPSEFCLGKFDEPLDMSLFSFIGSPRINATGQGVTIFYVDRLGYYPYIDSITGVTVNGGIPQKISLQDHLDKAKKDITFYMPVDNLGMAVIDWEEWRPTWARNWKPKDVYKNRSIELVQQQNVQLSLTEATEKAKQEFEKAGKDFLVETIKLGKLLRPNHLWGYYLFPDCYNHHYKKPGYNGSCFNVEIKRNDDLSWLWNESTALYPSIYLNTQQSPVAAQLYVRNRVREAIRVSKIPDAKSPLPVFAYTRIVFTDQVLKFLSQDELVYTFGETVALGASGIVIWGTLSIMRSMKSCLLLDNYMETILNPYIINVTLAAKMCSQVLCQEQGVCIRKNWNSSDYLHLNPDNFAIQLEKGGKFTVRGKPTLEDLEQFSEKFYCSCYSTLSCKEKADVKDTDAVDVCIADGVCIDAFLKPPMETEEPQIFY

SEQ ID NO: 191 - protein, 447 aa, Artificial Sequence
  Mature PH20 36-482 with L at a position corresponding to amino acid residue 380
LNFRAPPVIPNVPFLWAWNAPSEFCLGKFDEPLDMSLFSFIGSPRINATGQGVTIFYVDRLGYYPYIDSITGVTVNGGIPQKISLQDHLDKAKKDITFYMPVDNLGMAVIDWEEWRPTWARNWKPKDVYKNRSIELVQQQNVQLSLTEATEKAKQEFEKAGKDFLVETIKLGKLLRPNHLWGYYLFPDCYNHHYKKPGYNGSCFNVEIKRNDDLSWLWNESTALYPSIYLNTQQSPVAATLYVRNRVREAIRVSKIPDAKSPLPVFAYTRIVFTDQVLKFLSQDELVYTFGETVALGASGIVIWGTLSIMRSMKSCLLLDNYMETILNPYIINVTLAAKMCSQVLCQEQGVCIRKNWNSSDYLHLNPDNFAIQLEKGGKLTVRGKPTLEDLEQFSEKFYCSCYSTLSCKEKADVKDTDAVDVCIADGVCIDAFLKPPMETEEPQIFY

SEQ ID NO: 192 - protein, 447 aa, Artificial Sequence
  Mature PH20 36-482 with P at a position corresponding to amino acid residue 380
LNFRAPPVIPNVPFLWAWNAPSEFCLGKFDEPLDMSLFSFIGSPRINATGQGVTIFYVDRLGYYPYIDSITGVTVNGGIPQKISLQDHLDKAKKDITFYMPVDNLGMAVIDWEEWRPTWARNWKPKDVYKNRSIELVQQQNVQLSLTEATEKAKQEFEKAGKDFLVETIKLGKLLRPNHLWGYYLFPDCYNHHYKKPGYNGSCFNVEIKRNDDLSWLWNESTALYPSIYLNTQQSPVAATLYVRNRVREAIRVSKIPDAKSPLPVFAYTRIVFTDQVLKFLSQDELVYTFGETVALGASGIVIWGTLSIMRSMKSCLLLDNYMETILNPYIINVTLAAKMCSQVLCQEQGVCIRKNWNSSDYLHLNPDNFAIQLEKGGKPTVRGKPTLEDLEQFSEKFYCSCYSTLSCKEKADVKDTDAVDVCIADGVCIDAFLKPPMETEEPQIFY

SEQ ID NO: 193 - protein, 447 aa, Artificial Sequence
  Mature PH20 36-482 with I at a position corresponding to amino acid residue 380
LNFRAPPVIPNVPFLWAWNAPSEFCLGKFDEPLDMSLFSFIGSPRINATGQGVTIFYVDRLGYYPYIDSITGVTVNGGIPQKISLQDHLDKAKKDITFYMPVDNLGMAVIDWEEWRPTWARNWKPKDVYKNRSIELVQQQNVQLSLTEATEKAKQEFEKAGKDFLVETIKLGKLLRPNHLWGYYLFPDCYNHHYKKPGYNGSCFNVEIKRNDDLSWLWNESTALYPSIYLNTQQSPVAATLYVRNRVREAIRVSKIPDAKSPLPVFAYTRIVFTDQVLKFLSQDELVYTFGETVALGASGIVIWGTLSIMRSMKSCLLLDNYMETILNPYIINVTLAAKMCSQVLCQEQGVCIRKNWNSSDYLHLNPDNFAIQLEKGGKITVRGKPTLEDLEQFSEKFYCSCYSTLSCKEKADVKDTDAVDVCIADGVCIDAFLKPPMETEEPQIFY

SEQ ID NO: 194 - protein, 447 aa, Artificial Sequence
  Mature PH20 36-482 with Q at a position corresponding to amino acid residue 159
LNFRAPPVIPNVPFLWAWNAPSEFCLGKFDEPLDMSLFSFIGSPRINATGQGVTIFYVDRLGYYPYIDSITGVTVNGGIPQKISLQDHLDKAKKDITFYMPVDNLGMAVIDWEEWRPTWARNWKPKDVYKNRSIELVQQQNVQLSLTEATEKAKQEFEQAGKDFLVETIKLGKLLRPNHLWGYYLFPDCYNHHYKKPGYNGSCFNVEIKRNDDLSWLWNESTALYPSIYLNTQQSPVAATLYVRNRVREAIRVSKIPDAKSPLPVFAYTRIVFTDQVLKFLSQDELVYTFGETVALGASGIVIWGTLSIMRSMKSCLLLDNYMETILNPYIINVTLAAKMCSQVLCQEQGVCIRKNWNSSDYLHLNPDNFAIQLEKGGKFTVRGKPTLEDLEQFSEKFYCSCYSTLSCKEKADVKDTDAVDVCIADGVCIDAFLKPPMETEEPQIFY

SEQ ID NO: 195 - protein, 447 aa, Artificial Sequence
  Mature PH20 36-482 with C at a position corresponding to amino acid residue 50
LNFRAPPVIPNVPFLWAWNAPSEFCLGKFDEPLDMSLFSFIGSPRINATCQGVTIFYVDRLGYYPYIDSITGVTVNGGIPQKISLQDHLDKAKKDITFYMPVDNLGMAVIDWEEWRPTWARNWKPKDVYKNRSIELVQQQNVQLSLTEATEKAKQEFEKAGKDFLVETIKLGKLLRPNHLWGYYLFPDCYNHHYKKPGYNGSCFNVEIKRNDDLSWLWNESTALYPSIYLNTQQSPVAATLYVRNRVREAIRVSKIPDAKSPLPVFAYTRIVFTDQVLKFLSQDELVYTFGETVALGASGIVIWGTLSIMRSMKSCLLLDNYMETILNPYIINVTLAAKMCSQVLCQEQGVCIRKNWNSSDYLHLNPDNFAIQLEKGGKFTVRGKPTLEDLEQFSEKFYCSCYSTLSCKEKADVKDTDAVDVCIADGVCIDAFLKPPMETEEPQIFY

SEQ ID NO: 196 - protein, 447 aa, Artificial Sequence
  Mature PH20 36-482 with A at a position corresponding to amino acid residue 261
LNFRAPPVIPNVPFLWAWNAPSEFCLGKFDEPLDMSLFSFIGSPRINATGQGVTIFYVDRLGYYPYIDSITGVTVNGGIPQKISLQDHLDKAKKDITFYMPVDNLGMAVIDWEEWRPTWARNWKPKDVYKNRSIELVQQQNVQLSLTEATEKAKQEFEKAGKDFLVETIKLGKLLRPNHLWGYYLFPDCYNHHYKKPGYNGSCFNVEIKRNDDLSWLWNESTALYPSIYLNTQQSPVAATLYVRNRVREAIRVSKIPDAKAPLPVFAYTRIVFTDQVLKFLSQDELVYTFGETVALGASGIVIWGTLSIMRSMKSCLLLDNYMETILNPYIINVTLAAKMCSQVLCQEQGVCIRKNWNSSDYLHLNPDNFAIQLEKGGKFTVRGKPTLEDLEQFSEKFYCSCYSTLSCKEKADVKDTDAVDVCIADGVCIDAFLKPPMETEEPQIFY

SEQ ID NO: 197 - protein, 447 aa, Artificial Sequence
  Mature PH20 36-482 with Q at a position corresponding to amino acid residue 237
LNFRAPPVIPNVPFLWAWNAPSEFCLGKFDEPLDMSLFSFIGSPRINATGQGVTIFYVDRLGYYPYIDSITGVTVNGGIPQKISLQDHLDKAKKDITFYMPVDNLGMAVIDWEEWRPTWARNWKPKDVYKNRSIELVQQQNVQLSLTEATEKAKQEFEKAGKDFLVETIKLGKLLRPNHLWGYYLFPDCYNHHYKKPGYNGSCFNVEIKRNDDLSWLWNESTALYPSIYLNTQQSPQAATLYVRNRVREAIRVSKIPDAKSPLPVFAYTRIVFTDQVLKFLSQDELVYTFGETVALGASGIVIWGTLSIMRSMKSCLLLDNYMETILNPYIINVTLAAKMCSQVLCQEQGVCIRKNWNSSDYLHLNPDNFAIQLEKGGKFTVRGKPTLEDLEQFSEKFYCSCYSTLSCKEKADVKDTDAVDVCIADGVCIDAFLKPPMETEEPQIFY

SEQ ID NO: 198 - protein, 447 aa, Artificial Sequence
  Mature PH20 36-482 with Q at a position corresponding to amino acid residue 407
LNFRAPPVIPNVPFLWAWNAPSEFCLGKFDEPLDMSLFSFIGSPRINATGQGVTIFYVDRLGYYPYIDSITGVTVNGGIPQKISLQDHLDKAKKDITFYMPVDNLGMAVIDWEEWRPTWARNWKPKDVYKNRSIELVQQQNVQLSLTEATEKAKQEFEKAGKDFLVETIKLGKLLRPNHLWGYYLFPDCYNHHYKKPGYNGSCFNVEIKRNDDLSWLWNESTALYPSIYLNTQQSPVAATLYVRNRVREAIRVSKIPDAKSPLPVFAYTRIVFTDQVLKFLSQDELVYTFGETVALGASGIVIWGTLSIMRSMKSCLLLDNYMETILNPYIINVTLAAKMCSQVLCQEQGVCIRKNWNSSDYLHLNPDNFAIQLEKGGKFTVRGKPTLEDLEQFSEKFYCSCYSTLQCKEKADVKDTDAVDVCIADGVCIDAFLKPPMETEEPQIFY

SEQ ID NO: 199 - protein, 447 aa, Artificial Sequence
  Mature PH20 36-482 with I at a position corresponding to amino acid residue 152
LNFRAPPVIPNVPFLWAWNAPSEFCLGKFDEPLDMSLFSFIGSPRINATGQGVTIFYVDRLGYYPYIDSITGVTVNGGIPQKISLQDHLDKAKKDITFYMPVDNLGMAVIDWEEWRPTWARNWKPKDVYKNRSIELVQQQNVQLSLTEATEIAKQEFEKAGKDFLVETIKLGKLLRPNHLWGYYLFPDCYNHHYKKPGYNGSCFNVEIKRNDDLSWLWNESTALYPSIYLNTQQSPVAATLYVRNRVREAIRVSKIPDAKSPLPVFAYTRIVFTDQVLKFLSQDELVYTFGETVALGASGIVIWGTLSIMRSMKSCLLLDNYMETILNPYIINVTLAAKMCSQVLCQEQGVCIRKNWNSSDYLHLNPDNFAIQLEKGGKFTVRGKPTLEDLEQFSEKFYCSCYSTLSCKEKADVKDTDAVDVCIADGVCIDAFLKPPMETEEPQIFY

SEQ ID NO: 200 - protein, 447 aa, Artificial Sequence
  Mature PH20 36-482 with Q at a position corresponding to amino acid residue 32
LNFRAPPVIPNVPFLWAWNAPSEFCLGKFDEQLDMSLFSFIGSPRINATGQGVTIFYVDRLGYYPYIDSITGVTVNGGIPQKISLQDHLDKAKKDITFYMPVDNLGMAVIDWEEWRPTWARNWKPKDVYKNRSIELVQQQNVQLSLTEATEKAKQEFEKAGKDFLVETIKLGKLLRPNHLWGYYLFPDCYNHHYKKPGYNGSCFNVEIKRNDDLSWLWNESTALYPSIYLNTQQSPVAATLYVRNRVREAIRVSKIPDAKSPLPVFAYTRIVFTDQVLKFLSQDELVYTFGETVALGASGIVIWGTLSIMRSMKSCLLLDNYMETILNPYIINVTLAAKMCSQVLCQEQGVCIRKNWNSSDYLHLNPDNFAIQLEKGGKFTVRGKPTLEDLEQFSEKFYCSCYSTLSCKEKADVKDTDAVDVCIADGVCIDAFLKPPMETEEPQIFY

SEQ ID NO: 201 - protein, 447 aa, Artificial Sequence
  Mature PH20 36-482 with V at a position corresponding to amino acid residue 155
LNFRAPPVIPNVPFLWAWNAPSEFCLGKFDEPLDMSLFSFIGSPRINATGQGVTIFYVDRLGYYPYIDSITGVTVNGGIPQKISLQDHLDKAKKDITFYMPVDNLGMAVIDWEEWRPTWARNWKPKDVYKNRSIELVQQQNVQLSLTEATEKAKVEFEKAGKDFLVETIKLGKLLRPNHLWGYYLFPDCYNHHYKKPGYNGSCFNVEIKRNDDLSWLWNESTALYPSIYLNTQQSPVAATLYVRNRVREAIRVSKIPDAKSPLPVFAYTRIVFTDQVLKFLSQDELVYTFGETVALGASGIVIWGTLSIMRSMKSCLLLDNYMETILNPYIINVTLAAKMCSQVLCQEQGVCIRKNWNSSDYLHLNPDNFAIQLEKGGKFTVRGKPTLEDLEQFSEKFYCSCYSTLSCKEKADVKDTDAVDVCIADGVCIDAFLKPPMETEEPQIFY

SEQ ID NO: 202 - protein, 447 aa, Artificial Sequence
  Mature PH20 36-482 with A at a position corresponding to amino acid residue 156
LNFRAPPVIPNVPFLWAWNAPSEFCLGKFDEPLDMSLFSFIGSPRINATGQGVTIFYVDRLGYYPYIDSITGVTVNGGIPQKISLQDHLDKAKKDITFYMPVDNLGMAVIDWEEWRPTWARNWKPKDVYKNRSIELVQQQNVQLSLTEATEKAKQAFEKAGKDFLVETIKLGKLLRPNHLWGYYLFPDCYNHHYKKPGYNGSCFNVEIKRNDDLSWLWNESTALYPSIYLNTQQSPVAATLYVRNRVREAIRVSKIPDAKSPLPVFAYTRIVFTDQVLKFLSQDELVYTFGETVALGASGIVIWGTLSIMRSMKSCLLLDNYMETILNPYIINVTLAAKMCSQVLCQEQGVCIRKNWNSSDYLHLNPDNFAIQLEKGGKFTVRGKPTLEDLEQFSEKFYCSCYSTLSCKEKADVKDTDAVDVCIADGVCIDAFLKPPMETEEPQIFY

SEQ ID NO: 203 - protein, 447 aa, Artificial Sequence
  Mature PH20 36-482 with C at a position corresponding to amino acid residue 156
LNFRAPPVIPNVPFLWAWNAPSEFCLGKFDEPLDMSLFSFIGSPRINATGQGVTIFYVDRLGYYPYIDSITGVTVNGGIPQKISLQDHLDKAKKDITFYMPVDNLGMAVIDWEEWRPTWARNWKPKDVYKNRSIELVQQQNVQLSLTEATEKAKQCFEKAGKDFLVETIKLGKLLRPNHLWGYYLFPDCYNHHYKKPGYNGSCFNVEIKRNDDLSWLWNESTALYPSIYLNTQQSPVAATLYVRNRVREAIRVSKIPDAKSPLPVFAYTRIVFTDQVLKFLSQDELVYTFGETVALGASGIVIWGTLSIMRSMKSCLLLDNYMETILNPYIINVTLAAKMCSQVLCQEQGVCIRKNWNSSDYLHLNPDNFAIQLEKGGKFTVRGKPTLEDLEQFSEKFYCSCYSTLSCKEKADVKDTDAVDVCIADGVCIDAFLKPPMETEEPQIFY

SEQ ID NO: 204 - protein, 447 aa, Artificial Sequence
  Mature PH20 36-482 with Q at a position corresponding to amino acid residue 156
LNFRAPPVIPNVPFLWAWNAPSEFCLGKFDEPLDMSLFSFIGSPRINATGQGVTIFYVDRLGYYPYIDSITGVTVNGGIPQKISLQDHLDKAKKDITFYMPVDNLGMAVIDWEEWRPTWARNWKPKDVYKNRSIELVQQQNVQLSLTEATEKAKQQFEKAGKDFLVETIKLGKLLRPNHLWGYYLFPDCYNHHYKKPGYNGSCFNVEIKRNDDLSWLWNESTALYPSIYLNTQQSPVAATLYVRNRVREAIRVSKIPDAKSPLPVFAYTRIVFTDQVLKFLSQDELVYTFGETVALGASGIVIWGTLSIMRSMKSCLLLDNYMETILNPYIINVTLAAKMCSQVLCQEQGVCIRKNWNSSDYLHLNPDNFAIQLEKGGKFTVRGKPTLEDLEQFSEKFYCSCYSTLSCKEKADVKDTDAVDVCIADGVCIDAFLKPPMETEEPQIFY

SEQ ID NO: 205 - protein, 447 aa, Artificial Sequence
  Mature PH20 36-482 with R at a position corresponding to amino acid residue 155
LNFRAPPVIPNVPFLWAWNAPSEFCLGKFDEPLDMSLFSFIGSPRINATGQGVTIFYVDRLGYYPYIDSITGVTVNGGIPQKISLQDHLDKAKKDITFYMPVDNLGMAVIDWEEWRPTWARNWKPKDVYKNRSIELVQQQNVQLSLTEATEKAKREFEKAGKDFLVETIKLGKLLRPNHLWGYYLFPDCYNHHYKKPGYNGSCFNVEIKRNDDLSWLWNESTALYPSIYLNTQQSPVAATLYVRNRVREAIRVSKIPDAKSPLPVFAYTRIVFTDQVLKFLSQDELVYTFGETVALGASGIVIWGTLSIMRSMKSCLLLDNYMETILNPYIINVTLAAKMCSQVLCQEQGVCIRKNWNSSDYLHLNPDNFAIQLEKGGKFTVRGKPTLEDLEQFSEKFYCSCYSTLSCKEKADVKDTDAVDVCIADGVCIDAFLKPPMETEEPQIFY

SEQ ID NO: 206 - protein, 447 aa, Artificial Sequence
  Mature PH20 36-482 with D at a position corresponding to amino acid residue 86
LNFRAPPVIPNVPFLWAWNAPSEFCLGKFDEPLDMSLFSFIGSPRINATGQGVTIFYVDRLGYYPYIDSITGVTVNGGIPQKISLDDHLDKAKKDITFYMPVDNLGMAVIDWEEWRPTWARNWKPKDVYKNRSIELVQQQNVQLSLTEATEKAKQEFEKAGKDFLVETIKLGKLLRPNHLWGYYLFPDCYNHHYKKPGYNGSCFNVEIKRNDDLSWLWNESTALYPSIYLNTQQSPVAATLYVRNRVREAIRVSKIPDAKSPLPVFAYTRIVFTDQVLKFLSQDELVYTFGETVALGASGIVIWGTLSIMRSMKSCLLLDNYMETILNPYIINVTLAAKMCSQVLCQEQGVCIRKNWNSSDYLHLNPDNFAIQLEKGGKFTVRGKPTLEDLEQFSEKFYCSCYSTLSCKEKADVKDTDAVDVCIADGVCIDAFLKPPMETEEPQIFY

SEQ ID NO: 207 - protein, 447 aa, Artificial Sequence
  Mature PH20 36-482 with L at a position corresponding to amino acid residue 131
LNFRAPPVIPNVPFLWAWNAPSEFCLGKFDEPLDMSLFSFIGSPRINATGQGVTIFYVDRLGYYPYIDSITGVTVNGGIPQKISLQDHLDKAKKDITFYMPVDNLGMAVIDWEEWRPTWARNWKPKDVYKLRSIELVQQQNVQLSLTEATEKAKQEFEKAGKDFLVETIKLGKLLRPNHLWGYYLFPDCYNHHYKKPGYNGSCFNVEIKRNDDLSWLWNESTALYPSIYLNTQQSPVAATLYVRNRVREAIRVSKIPDAKSPLPVFAYTRIVFTDQVLKFLSQDELVYTFGETVALGASGIVIWGTLSIMRSMKSCLLLDNYMETILNPYIINVTLAAKMCSQVLCQEQGVCIRKNWNSSDYLHLNPDNFAIQLEKGGKFTVRGKPTLEDLEQFSEKFYCSCYSTLSCKEKADVKDTDAVDVCIADGVCIDAFLKPPMETEEPQIFY

SEQ ID NO: 208 - protein, 447 aa, Artificial Sequence
  Mature PH20 36-482 with H at a position corresponding to amino acid residue 159
LNFRAPPVIPNVPFLWAWNAPSEFCLGKFDEPLDMSLFSFIGSPRINATGQGVTIFYVDRLGYYPYIDSITGVTVNGGIPQKISLQDHLDKAKKDITFYMPVDNLGMAVIDWEEWRPTWARNWKPKDVYKNRSIELVQQQNVQLSLTEATEKAKQEFEHAGKDFLVETIKLGKLLRPNHLWGYYLFPDCYNHHYKKPGYNGSCFNVEIKRNDDLSWLWNESTALYPSIYLNTQQSPVAATLYVRNRVREAIRVSKIPDAKSPLPVFAYTRIVFTDQVLKFLSQDELVYTFGETVALGASGIVIWGTLSIMRSMKSCLLLDNYMETILNPYIINVTLAAKMCSQVLCQEQGVCIRKNWNSSDYLHLNPDNFAIQLEKGGKFTVRGKPTLEDLEQFSEKFYCSCYSTLSCKEKADVKDTDAVDVCIADGVCIDAFLKPPMETEEPQIFY

SEQ ID NO: 209 - protein, 447 aa, Artificial Sequence
  Mature PH20 36-482 with T at a position corresponding to amino acid residue 205
LNFRAPPVIPNVPFLWAWNAPSEFCLGKFDEPLDMSLFSFIGSPRINATGQGVTIFYVDRLGYYPYIDSITGVTVNGGIPQKISLQDHLDKAKKDITFYMPVDNLGMAVIDWEEWRPTWARNWKPKDVYKNRSIELVQQQNVQLSLTEATEKAKQEFEKAGKDFLVETIKLGKLLRPNHLWGYYLFPDCYNHHYKKPGYNGSCFTVEIKRNDDLSWLWNESTALYPSIYLNTQQSPVAATLYVRNRVREAIRVSKIPDAKSPLPVFAYTRIVFTDQVLKFLSQDELVYTFGETVALGASGIVIWGTLSIMRSMKSCLLLDNYMETILNPYIINVTLAAKMCSQVLCQEQGVCIRKNWNSSDYLHLNPDNFAIQLEKGGKFTVRGKPTLEDLEQFSEKFYCSCYSTLSCKEKADVKDTDAVDVCIADGVCIDAFLKPPMETEEPQIFY

SEQ ID NO: 210 - protein, 447 aa, Artificial Sequence
  Mature PH20 36-482 with Q at a position corresponding to amino acid residue 208
LNFRAPPVIPNVPFLWAWNAPSEFCLGKFDEPLDMSLFSFIGSPRINATGQGVTIFYVDRLGYYPYIDSITGVTVNGGIPQKISLQDHLDKAKKDITFYMPVDNLGMAVIDWEEWRPTWARNWKPKDVYKNRSIELVQQQNVQLSLTEATEKAKQEFEKAGKDFLVETIKLGKLLRPNHLWGYYLFPDCYNHHYKKPGYNGSCFNVEQKRNDDLSWLWNESTALYPSIYLNTQQSPVAATLYVRNRVREAIRVSKIPDAKSPLPVFAYTRIVFTDQVLKFLSQDELVYTFGETVALGASGIVIWGTLSIMRSMKSCLLLDNYMETILNPYIINVTLAAKMCSQVLCQEQGVCIRKNWNSSDYLHLNPDNFAIQLEKGGKFTVRGKPTLEDLEQFSEKFYCSCYSTLSCKEKADVKDTDAVDVCIADGVCIDAFLKPPMETEEPQIFY

SEQ ID NO: 211 - protein, 447 aa, Artificial Sequence
  Mature PH20 36-482 with L at a position corresponding to amino acid residue 328
LNFRAPPVIPNVPFLWAWNAPSEFCLGKFDEPLDMSLFSFIGSPRINATGQGVTIFYVDRLGYYPYIDSITGVTVNGGIPQKISLQDHLDKAKKDITFYMPVDNLGMAVIDWEEWRPTWARNWKPKDVYKNRSIELVQQQNVQLSLTEATEKAKQEFEKAGKDFLVETIKLGKLLRPNHLWGYYLFPDCYNHHYKKPGYNGSCFNVEIKRNDDLSWLWNESTALYPSIYLNTQQSPVAATLYVRNRVREAIRVSKIPDAKSPLPVFAYTRIVFTDQVLKFLSQDELVYTFGETVALGASGIVIWGTLSIMRSMKSCLLLDNYMETILLPYIINVTLAAKMCSQVLCQEQGVCIRKNWNSSDYLHLNPDNFAIQLEKGGKFTVRGKPTLEDLEQFSEKFYCSCYSTLSCKEKADVKDTDAVDVCIADGVCIDAFLKPPMETEEPQIFY

SEQ ID NO: 212 - protein, 447 aa, Artificial Sequence
  Mature PH20 36-482 with R at a position corresponding to amino acid residue 328
LNFRAPPVIPNVPFLWAWNAPSEFCLGKFDEPLDMSLFSFIGSPRINATGQGVTIFYVDRLGYYPYIDSITGVTVNGGIPQKISLQDHLDKAKKDITFYMPVDNLGMAVIDWEEWRPTWARNWKPKDVYKNRSIELVQQQNVQLSLTEATEKAKQEFEKAGKDFLVETIKLGKLLRPNHLWGYYLFPDCYNHHYKKPGYNGSCFNVEIKRNDDLSWLWNESTALYPSIYLNTQQSPVAATLYVRNRVREAIRVSKIPDAKSPLPVFAYTRIVFTDQVLKFLSQDELVYTFGETVALGASGIVIWGTLSIMRSMKSCLLLDNYMETILRPYIINVTLAAKMCSQVLCQEQGVCIRKNWNSSDYLHLNPDNFAIQLEKGGKFTVRGKPTLEDLEQFSEKFYCSCYSTLSCKEKADVKDTDAVDVCIADGVCIDAFLKPPMETEEPQIFY

SEQ ID NO: 213 - protein, 447 aa, Artificial Sequence
  Mature PH20 36-482 with D at a position corresponding to amino acid residue 161
LNFRAPPVIPNVPFLWAWNAPSEFCLGKFDEPLDMSLFSFIGSPRINATGQGVTIFYVDRLGYYPYIDSITGVTVNGGIPQKISLQDHLDKAKKDITFYMPVDNLGMAVIDWEEWRPTWARNWKPKDVYKNRSIELVQQQNVQLSLTEATEKAKQEFEKADKDFLVETIKLGKLLRPNHLWGYYLFPDCYNHHYKKPGYNGSCFNVEIKRNDDLSWLWNESTALYPSIYLNTQQSPVAATLYVRNRVREAIRVSKIPDAKSPLPVFAYTRIVFTDQVLKFLSQDELVYTFGETVALGASGIVIWGTLSIMRSMKSCLLLDNYMETILNPYIINVTLAAKMCSQVLCQEQGVCIRKNWNSSDYLHLNPDNFAIQLEKGGKFTVRGKPTLEDLEQFSEKFYCSCYSTLSCKEKADVKDTDAVDVCIADGVCIDAFLKPPMETEEPQIFY

SEQ ID NO: 214 - protein, 447 aa, Artificial Sequence
  Mature PH20 36-482 with S at a position corresponding to amino acid residue 373
LNFRAPPVIPNVPFLWAWNAPSEFCLGKFDEPLDMSLFSFIGSPRINATGQGVTIFYVDRLGYYPYIDSITGVTVNGGIPQKISLQDHLDKAKKDITFYMPVDNLGMAVIDWEEWRPTWARNWKPKDVYKNRSIELVQQQNVQLSLTEATEKAKQEFEKAGKDFLVETIKLGKLLRPNHLWGYYLFPDCYNHHYKKPGYNGSCFNVEIKRNDDLSWLWNESTALYPSIYLNTQQSPVAATLYVRNRVREAIRVSKIPDAKSPLPVFAYTRIVFTDQVLKFLSQDELVYTFGETVALGASGIVIWGTLSIMRSMKSCLLLDNYMETILNPYIINVTLAAKMCSQVLCQEQGVCIRKNWNSSDYLHLNPDNFAISLEKGGKFTVRGKPTLEDLEQFSEKFYCSCYSTLSCKEKADVKDTDAVDVCIADGVCIDAFLKPPMETEEPQIFY

SEQ ID NO: 215 - protein, 447 aa, Artificial Sequence
  Mature PH20 36-482 with G at a position corresponding to amino acid residue 144
LNFRAPPVIPNVPFLWAWNAPSEFCLGKFDEPLDMSLFSFIGSPRINATGQGVTIFYVDRLGYYPYIDSITGVTVNGGIPQKISLQDHLDKAKKDITFYMPVDNLGMAVIDWEEWRPTWARNWKPKDVYKNRSIELVQQQNVQGSLTEATEKAKQEFEKAGKDFLVETIKLGKLLRPNHLWGYYLFPDCYNHHYKKPGYNGSCFNVEIKRNDDLSWLWNESTALYPSIYLNTQQSPVAATLYVRNRVREAIRVSKIPDAKSPLPVFAYTRIVFTDQVLKFLSQDELVYTFGETVALGASGIVIWGTLSIMRSMKSCLLLDNYMETILNPYIINVTLAAKMCSQVLCQEQGVCIRKNWNSSDYLHLNPDNFAIQLEKGGKFTVRGKPTLEDLEQFSEKFYCSCYSTLSCKEKADVKDTDAVDVCIADGVCIDAFLKPPMETEEPQIFY

SEQ ID NO: 216 - protein, 447 aa, Artificial Sequence
  Mature PH20 36-482 with R at a position corresponding to amino acid residue 310
LNFRAPPVIPNVPFLWAWNAPSEFCLGKFDEPLDMSLFSFIGSPRINATGQGVTIFYVDRLGYYPYIDSITGVTVNGGIPQKISLQDHLDKAKKDITFYMPVDNLGMAVIDWEEWRPTWARNWKPKDVYKNRSIELVQQQNVQLSLTEATEKAKQEFEKAGKDFLVETIKLGKLLRPNHLWGYYLFPDCYNHHYKKPGYNGSCFNVEIKRNDDLSWLWNESTALYPSIYLNTQQSPVAATLYVRNRVREAIRVSKIPDAKSPLPVFAYTRIVFTDQVLKFLSQDELVYTFGETVALGASGIVIWGTLSIRRSMKSCLLLDNYMETILNPYIINVTLAAKMCSQVLCQEQGVCIRKNWNSSDYLHLNPDNFAIQLEKGGKFTVRGKPTLEDLEQFSEKFYCSCYSTLSCKEKADVKDTDAVDVCIADGVCIDAFLKPPMETEEPQIFY

SEQ ID NO: 217 - protein, 447 aa, Artificial Sequence
  Mature PH20 36-482 with S at a position corresponding to amino acid residue 29
LNFRAPPVIPNVPFLWAWNAPSEFCLGKSDEPLDMSLFSFIGSPRINATGQGVTIFYVDRLGYYPYIDSITGVTVNGGIPQKISLQDHLDKAKKDITFYMPVDNLGMAVIDWEEWRPTWARNWKPKDVYKNRSIELVQQQNVQLSLTEATEKAKQEFEKAGKDFLVETIKLGKLLRPNHLWGYYLFPDCYNHHYKKPGYNGSCFNVEIKRNDDLSWLWNESTALYPSIYLNTQQSPVAATLYVRNRVREAIRVSKIPDAKSPLPVFAYTRIVFTDQVLKFLSQDELVYTFGETVALGASGIVIWGTLSIMRSMKSCLLLDNYMETILNPYIINVTLAAKMCSQVLCQEQGVCIRKNWNSSDYLHLNPDNFAIQLEKGGKFTVRGKPTLEDLEQFSEKFYCSCYSTLSCKEKADVKDTDAVDVCIADGVCIDAFLKPPMETEEPQIFY

SEQ ID NO: 218 - protein, 447 aa, Artificial Sequence
  Mature PH20 36-482 with T at a position corresponding to amino acid residue 235
LNFRAPPVIPNVPFLWAWNAPSEFCLGKFDEPLDMSLFSFIGSPRINATGQGVTIFYVDRLGYYPYIDSITGVTVNGGIPQKISLQDHLDKAKKDITFYMPVDNLGMAVIDWEEWRPTWARNWKPKDVYKNRSIELVQQQNVQLSLTEATEKAKQEFEKAGKDFLVETIKLGKLLRPNHLWGYYLFPDCYNHHYKKPGYNGSCFNVEIKRNDDLSWLWNESTALYPSIYLNTQQTPVAATLYVRNRVREAIRVSKIPDAKSPLPVFAYTRIVFTDQVLKFLSQDELVYTFGETVALGASGIVIWGTLSIMRSMKSCLLLDNYMETILNPYIINVTLAAKMCSQVLCQEQGVCIRKNWNSSDYLHLNPDNFAIQLEKGGKFTVRGKPTLEDLEQFSEKFYCSCYSTLSCKEKADVKDTDAVDVCIADGVCIDAFLKPPMETEEPQIFY

SEQ ID NO: 219 - protein, 447 aa, Artificial Sequence
  Mature PH20 36-482 with R at a position corresponding to amino acid residue 170
LNFRAPPVIPNVPFLWAWNAPSEFCLGKFDEPLDMSLFSFIGSPRINATGQGVTIFYVDRLGYYPYIDSITGVTVNGGIPQKISLQDHLDKAKKDITFYMPVDNLGMAVIDWEEWRPTWARNWKPKDVYKNRSIELVQQQNVQLSLTEATEKAKQEFEKAGKDFLVETIRLGKLLRPNHLWGYYLFPDCYNHHYKKPGYNGSCFNVEIKRNDDLSWLWNESTALYPSIYLNTQQSPVAATLYVRNRVREAIRVSKIPDAKSPLPVFAYTRIVFTDQVLKFLSQDELVYTFGETVALGASGIVIWGTLSIMRSMKSCLLLDNYMETILNPYIINVTLAAKMCSQVLCQEQGVCIRKNWNSSDYLHLNPDNFAIQLEKGGKFTVRGKPTLEDLEQFSEKFYCSCYSTLSCKEKADVKDTDAVDVCIADGVCIDAFLKPPMETEEPQIFY

SEQ ID NO: 220 - protein, 447 aa, Artificial Sequence
  Mature PH20 36-482 with R at a position corresponding to amino acid residue 58
LNFRAPPVIPNVPFLWAWNAPSEFCLGKFDEPLDMSLFSFIGSPRINATGQGVTIFYRDRLGYYPYIDSITGVTVNGGIPQKISLQDHLDKAKKDITFYMPVDNLGMAVIDWEEWRPTWARNWKPKDVYKNRSIELVQQQNVQLSLTEATEKAKQEFEKAGKDFLVETIKLGKLLRPNHLWGYYLFPDCYNHHYKKPGYNGSCFNVEIKRNDDLSWLWNESTALYPSIYLNTQQSPVAATLYVRNRVREAIRVSKIPDAKSPLPVFAYTRIVFTDQVLKFLSQDELVYTFGETVALGASGIVIWGTLSIMRSMKSCLLLDNYMETILNPYIINVTLAAKMCSQVLCQEQGVCIRKNWNSSDYLHLNPDNFAIQLEKGGKFTVRGKPTLEDLEQFSEKFYCSCYSTLSCKEKADVKDTDAVDVCIADGVCIDAFLKPPMETEEPQIFY

SEQ ID NO: 221 - protein, 447 aa, Artificial Sequence
  Mature PH20 36-482 with K at a position corresponding to amino acid residue 143
LNFRAPPVIPNVPFLWAWNAPSEFCLGKFDEPLDMSLFSFIGSPRINATGQGVTIFYVDRLGYYPYIDSITGVTVNGGIPQKISLQDHLDKAKKDITFYMPVDNLGMAVIDWEEWRPTWARNWKPKDVYKNRSIELVQQQNVKLSLTEATEKAKQEFEKAGKDFLVETIKLGKLLRPNHLWGYYLFPDCYNHHYKKPGYNGSCFNVEIKRNDDLSWLWNESTALYPSIYLNTQQSPVAATLYVRNRVREAIRVSKIPDAKSPLPVFAYTRIVFTDQVLKFLSQDELVYTFGETVALGASGIVIWGTLSIMRSMKSCLLLDNYMETILNPYIINVTLAAKMCSQVLCQEQGVCIRKNWNSSDYLHLNPDNFAIQLEKGGKFTVRGKPTLEDLEQFSEKFYCSCYSTLSCKEKADVKDTDAVDVCIADGVCIDAFLKPPMETEEPQIFY

SEQ ID NO: 222 - protein, 447 aa, Artificial Sequence
  Mature PH20 36-482 with F at a position corresponding to amino acid residue 197
LNFRAPPVIPNVPFLWAWNAPSEFCLGKFDEPLDMSLFSFIGSPRINATGQGVTIFYVDRLGYYPYIDSITGVTVNGGIPQKISLQDHLDKAKKDITFYMPVDNLGMAVIDWEEWRPTWARNWKPKDVYKNRSIELVQQQNVQLSLTEATEKAKQEFEKAGKDFLVETIKLGKLLRPNHLWGYYLFPDCYNHHYKKFGYNGSCFNVEIKRNDDLSWLWNESTALYPSIYLNTQQSPVAATLYVRNRVREAIRVSKIPDAKSPLPVFAYTRIVFTDQVLKFLSQDELVYTFGETVALGASGIVIWGTLSIMRSMKSCLLLDNYMETILNPYIINVTLAAKMCSQVLCQEQGVCIRKNWNSSDYLHLNPDNFAIQLEKGGKFTVRGKPTLEDLEQFSEKFYCSCYSTLSCKEKADVKDTDAVDVCIADGVCIDAFLKPPMETEEPQIFY

SEQ ID NO: 223 - protein, 447 aa, Artificial Sequence
  Mature PH20 36-482 with N at a position corresponding to amino acid residue 195
LNFRAPPVIPNVPFLWAWNAPSEFCLGKFDEPLDMSLFSFIGSPRINATGQGVTIFYVDRLGYYPYIDSITGVTVNGGIPQKISLQDHLDKAKKDITFYMPVDNLGMAVIDWEEWRPTWARNWKPKDVYKNRSIELVQQQNVQLSLTEATEKAKQEFEKAGKDFLVETIKLGKLLRPNHLWGYYLFPDCYNHHYNKPGYNGSCFNVEIKRNDDLSWLWNESTALYPSIYLNTQQSPVAATLYVRNRVREAIRVSKIPDAKSPLPVFAYTRIVFTDQVLKFLSQDELVYTFGETVALGASGIVIWGTLSIMRSMKSCLLLDNYMETILNPYIINVTLAAKMCSQVLCQEQGVCIRKNWNSSDYLHLNPDNFAIQLEKGGKFTVRGKPTLEDLEQFSEKFYCSCYSTLSCKEKADVKDTDAVDVCIADGVCIDAFLKPPMETEEPQIFY

SEQ ID NO: 224 - protein, 447 aa, Artificial Sequence
  Mature PH20 36-482 with P at a position corresponding to amino acid residue 87
LNFRAPPVIPNVPFLWAWNAPSEFCLGKFDEPLDMSLFSFIGSPRINATGQGVTIFYVDRLGYYPYIDSITGVTVNGGIPQKISLQPHLDKAKKDITFYMPVDNLGMAVIDWEEWRPTWARNWKPKDVYKNRSIELVQQQNVQLSLTEATEKAKQEFEKAGKDFLVETIKLGKLLRPNHLWGYYLFPDCYNHHYKKPGYNGSCFNVEIKRNDDLSWLWNESTALYPSIYLNTQQSPVAATLYVRNRVREAIRVSKIPDAKSPLPVFAYTRIVFTDQVLKFLSQDELVYTFGETVALGASGIVIWGTLSIMRSMKSCLLLDNYMETILNPYIINVTLAAKMCSQVLCQEQGVCIRKNWNSSDYLHLNPDNFAIQLEKGGKFTVRGKPTLEDLEQFSEKFYCSCYSTLSCKEKADVKDTDAVDVCIADGVCIDAFLKPPMETEEPQIFY

SEQ ID NO: 225 - protein, 447 aa, Artificial Sequence
  Mature PH20 36-482 with S at a position corresponding to amino acid residue 99
LNFRAPPVIPNVPFLWAWNAPSEFCLGKFDEPLDMSLFSFIGSPRINATGQGVTIFYVDRLGYYPYIDSITGVTVNGGIPQKISLQDHLDKAKKDITFSMPVDNLGMAVIDWEEWRPTWARNWKPKDVYKNRSIELVQQQNVQLSLTEATEKAKQEFEKAGKDFLVETIKLGKLLRPNHLWGYYLFPDCYNHHYKKPGYNGSCFNVEIKRNDDLSWLWNESTALYPSIYLNTQQSPVAATLYVRNRVREAIRVSKIPDAKSPLPVFAYTRIVFTDQVLKFLSQDELVYTFGETVALGASGIVIWGTLSIMRSMKSCLLLDNYMETILNPYIINVTLAAKMCSQVLCQEQGVCIRKNWNSSDYLHLNPDNFAIQLEKGGKFTVRGKPTLEDLEQFSEKFYCSCYSTLSCKEKADVKDTDAVDVCIADGVCIDAFLKPPMETEEPQIFY

SEQ ID NO: 226 - protein, 447 aa, Artificial Sequence
  Mature PH20 36-482 with E at a position corresponding to amino acid residue 276
LNFRAPPVIPNVPFLWAWNAPSEFCLGKFDEPLDMSLFSFIGSPRINATGQGVTIFYVDRLGYYPYIDSITGVTVNGGIPQKISLQDHLDKAKKDITFYMPVDNLGMAVIDWEEWRPTWARNWKPKDVYKNRSIELVQQQNVQLSLTEATEKAKQEFEKAGKDFLVETIKLGKLLRPNHLWGYYLFPDCYNHHYKKPGYNGSCFNVEIKRNDDLSWLWNESTALYPSIYLNTQQSPVAATLYVRNRVREAIRVSKIPDAKSPLPVFAYTRIVFTDEVLKFLSQDELVYTFGETVALGASGIVIWGTLSIMRSMKSCLLLDNYMETILNPYIINVTLAAKMCSQVLCQEQGVCIRKNWNSSDYLHLNPDNFAIQLEKGGKFTVRGKPTLEDLEQFSEKFYCSCYSTLSCKEKADVKDTDAVDVCIADGVCIDAFLKPPMETEEPQIFY

SEQ ID NO: 227 - protein, 447 aa, Artificial Sequence
  Mature PH20 36-482 with M at a position corresponding to amino acid residue 202
LNFRAPPVIPNVPFLWAWNAPSEFCLGKFDEPLDMSLFSFIGSPRINATGQGVTIFYVDRLGYYPYIDSITGVTVNGGIPQKISLQDHLDKAKKDITFYMPVDNLGMAVIDWEEWRPTWARNWKPKDVYKNRSIELVQQQNVQLSLTEATEKAKQEFEKAGKDFLVETIKLGKLLRPNHLWGYYLFPDCYNHHYKKPGYNGMCFNVEIKRNDDLSWLWNESTALYPSIYLNTQQSPVAATLYVRNRVREAIRVSKIPDAKSPLPVFAYTRIVFTDQVLKFLSQDELVYTFGETVALGASGIVIWGTLSIMRSMKSCLLLDNYMETILNPYIINVTLAAKMCSQVLCQEQGVCIRKNWNSSDYLHLNPDNFAIQLEKGGKFTVRGKPTLEDLEQFSEKFYCSCYSTLSCKEKADVKDTDAVDVCIADGVCIDAFLKPPMETEEPQIFY

SEQ ID NO: 228 - protein, 447 aa, Artificial Sequence
  Mature PH20 36-482 with Q at a position corresponding to amino acid residue 282
LNFRAPPVIPNVPFLWAWNAPSEFCLGKFDEPLDMSLFSFIGSPRINATGQGVTIFYVDRLGYYPYIDSITGVTVNGGIPQKISLQDHLDKAKKDITFYMPVDNLGMAVIDWEEWRPTWARNWKPKDVYKNRSIELVQQQNVQLSLTEATEKAKQEFEKAGKDFLVETIKLGKLLRPNHLWGYYLFPDCYNHHYKKPGYNGSCFNVEIKRNDDLSWLWNESTALYPSIYLNTQQSPVAATLYVRNRVREAIRVSKIPDAKSPLPVFAYTRIVFTDQVLKFLQQDELVYTFGETVALGASGIVIWGTLSIMRSMKSCLLLDNYMETILNPYIINVTLAAKMCSQVLCQEQGVCIRKNWNSSDYLHLNPDNFAIQLEKGGKFTVRGKPTLEDLEQFSEKFYCSCYSTLSCKEKADVKDTDAVDVCIADGVCIDAFLKPPMETEEPQIFY

SEQ ID NO: 229 - protein, 447 aa, Artificial Sequence
  Mature PH20 36-482 with G at a position corresponding to amino acid residue 11
LNFRAPPVIPGVPFLWAWNAPSEFCLGKFDEPLDMSLFSFIGSPRINATGQGVTIFYVDRLGYYPYIDSITGVTVNGGIPQKISLQDHLDKAKKDITFYMPVDNLGMAVIDWEEWRPTWARNWKPKDVYKNRSIELVQQQNVQLSLTEATEKAKQEFEKAGKDFLVETIKLGKLLRPNHLWGYYLFPDCYNHHYKKPGYNGSCFNVEIKRNDDLSWLWNESTALYPSIYLNTQQSPVAATLYVRNRVREAIRVSKIPDAKSPLPVFAYTRIVFTDQVLKFLSQDELVYTFGETVALGASGIVIWGTLSIMRSMKSCLLLDNYMETILNPYIINVTLAAKMCSQVLCQEQGVCIRKNWNSSDYLHLNPDNFAIQLEKGGKFTVRGKPTLEDLEQFSEKFYCSCYSTLSCKEKADVKDTDAVDVCIADGVCIDAFLKPPMETEEPQIFY

SEQ ID NO: 230 - protein, 447 aa, Artificial Sequence
  Mature PH20 36-482 with S at a position corresponding to amino acid residue 410
LNFRAPPVIPNVPFLWAWNAPSEFCLGKFDEPLDMSLFSFIGSPRINATGQGVTIFYVDRLGYYPYIDSITGVTVNGGIPQKISLQDHLDKAKKDITFYMPVDNLGMAVIDWEEWRPTWARNWKPKDVYKNRSIELVQQQNVQLSLTEATEKAKQEFEKAGKDFLVETIKLGKLLRPNHLWGYYLFPDCYNHHYKKPGYNGSCFNVEIKRNDDLSWLWNESTALYPSIYLNTQQSPVAATLYVRNRVREAIRVSKIPDAKSPLPVFAYTRIVFTDQVLKFLSQDELVYTFGETVALGASGIVIWGTLSIMRSMKSCLLLDNYMETILNPYIINVTLAAKMCSQVLCQEQGVCIRKNWNSSDYLHLNPDNFAIQLEKGGKFTVRGKPTLEDLEQFSEKFYCSCYSTLSCKSKADVKDTDAVDVCIADGVCIDAFLKPPMETEEPQIFY

SEQ ID NO: 231 - protein, 447 aa, Artificial Sequence
  Mature PH20 36-482 with A at a position corresponding to amino acid residue 159
LNFRAPPVIPNVPFLWAWNAPSEFCLGKFDEPLDMSLFSFIGSPRINATGQGVTIFYVDRLGYYPYIDSITGVTVNGGIPQKISLQDHLDKAKKDITFYMPVDNLGMAVIDWEEWRPTWARNWKPKDVYKNRSIELVQQQNVQLSLTEATEKAKQEFEAAGKDFLVETIKLGKLLRPNHLWGYYLFPDCYNHHYKKPGYNGSCFNVEIKRNDDLSWLWNESTALYPSIYLNTQQSPVAATLYVRNRVREAIRVSKIPDAKSPLPVFAYTRIVFTDQVLKFLSQDELVYTFGETVALGASGIVIWGTLSIMRSMKSCLLLDNYMETILNPYIINVTLAAKMCSQVLCQEQGVCIRKNWNSSDYLHLNPDNFAIQLEKGGKFTVRGKPTLEDLEQFSEKFYCSCYSTLSCKEKADVKDTDAVDVCIADGVCIDAFLKPPMETEEPQIFY

SEQ ID NO: 232 - protein, 447 aa, Artificial Sequence
  Mature PH20 36-482 with L at a position corresponding to amino acid residue 195
LNFRAPPVIPNVPFLWAWNAPSEFCLGKFDEPLDMSLFSFIGSPRINATGQGVTIFYVDRLGYYPYIDSITGVTVNGGIPQKISLQDHLDKAKKDITFYMPVDNLGMAVIDWEEWRPTWARNWKPKDVYKNRSIELVQQQNVQLSLTEATEKAKQEFEKAGKDFLVETIKLGKLLRPNHLWGYYLFPDCYNHHYLKPGYNGSCFNVEIKRNDDLSWLWNESTALYPSIYLNTQQSPVAATLYVRNRVREAIRVSKIPDAKSPLPVFAYTRIVFTDQVLKFLSQDELVYTFGETVALGASGIVIWGTLSIMRSMKSCLLLDNYMETILNPYIINVTLAAKMCSQVLCQEQGVCIRKNWNSSDYLHLNPDNFAIQLEKGGKFTVRGKPTLEDLEQFSEKFYCSCYSTLSCKEKADVKDTDAVDVCIADGVCIDAFLKPPMETEEPQIFY

SEQ ID NO: 233 - protein, 447 aa, Artificial Sequence
  Mature PH20 36-482 with P at a position corresponding to amino acid residue 205
LNFRAPPVIPNVPFLWAWNAPSEFCLGKFDEPLDMSLFSFIGSPRINATGQGVTIFYVDRLGYYPYIDSITGVTVNGGIPQKISLQDHLDKAKKDITFYMPVDNLGMAVIDWEEWRPTWARNWKPKDVYKNRSIELVQQQNVQLSLTEATEKAKQEFEKAGKDFLVETIKLGKLLRPNHLWGYYLFPDCYNHHYKKPGYNGSCFPVEIKRNDDLSWLWNESTALYPSIYLNTQQSPVAATLYVRNRVREAIRVSKIPDAKSPLPVFAYTRIVFTDQVLKFLSQDELVYTFGETVALGASGIVIWGTLSIMRSMKSCLLLDNYMETILNPYIINVTLAAKMCSQVLCQEQGVCIRKNWNSSDYLHLNPDNFAIQLEKGGKFTVRGKPTLEDLEQFSEKFYCSCYSTLSCKEKADVKDTDAVDVCIADGVCIDAFLKPPMETEEPQIFY

SEQ ID NO: 234 - protein, 447 aa, Artificial Sequence
  Mature PH20 36-482 with S at a position corresponding to amino acid residue 205
LNFRAPPVIPNVPFLWAWNAPSEFCLGKFDEPLDMSLFSFIGSPRINATGQGVTIFYVDRLGYYPYIDSITGVTVNGGIPQKISLQDHLDKAKKDITFYMPVDNLGMAVIDWEEWRPTWARNWKPKDVYKNRSIELVQQQNVQLSLTEATEKAKQEFEKAGKDFLVETIKLGKLLRPNHLWGYYLFPDCYNHHYKKPGYNGSCFSVEIKRNDDLSWLWNESTALYPSIYLNTQQSPVAATLYVRNRVREAIRVSKIPDAKSPLPVFAYTRIVFTDQVLKFLSQDELVYTFGETVALGASGIVIWGTLSIMRSMKSCLLLDNYMETILNPYIINVTLAAKMCSQVLCQEQGVCIRKNWNSSDYLHLNPDNFAIQLEKGGKFTVRGKPTLEDLEQFSEKFYCSCYSTLSCKEKADVKDTDAVDVCIADGVCIDAFLKPPMETEEPQIFY

SEQ ID NO: 235 - protein, 447 aa, Artificial Sequence
  Mature PH20 36-482 with C at a position corresponding to amino acid residue 446
LNFRAPPVIPNVPFLWAWNAPSEFCLGKFDEPLDMSLFSFIGSPRINATGQGVTIFYVDRLGYYPYIDSITGVTVNGGIPQKISLQDHLDKAKKDITFYMPVDNLGMAVIDWEEWRPTWARNWKPKDVYKNRSIELVQQQNVQLSLTEATEKAKQEFEKAGKDFLVETIKLGKLLRPNHLWGYYLFPDCYNHHYKKPGYNGSCFNVEIKRNDDLSWLWNESTALYPSIYLNTQQSPVAATLYVRNRVREAIRVSKIPDAKSPLPVFAYTRIVFTDQVLKFLSQDELVYTFGETVALGASGIVIWGTLSIMRSMKSCLLLDNYMETILNPYIINVTLAAKMCSQVLCQEQGVCIRKNWNSSDYLHLNPDNFAIQLEKGGKFTVRGKPTLEDLEQFSEKFYCSCYSTLSCKEKADVKDTDAVDVCIADGVCIDAFLKPPMETEEPQICY

SEQ ID NO: 236 - protein, 447 aa, Artificial Sequence
  Mature PH20 36-482 with H at a position corresponding to amino acid residue 155
LNFRAPPVIPNVPFLWAWNAPSEFCLGKFDEPLDMSLFSFIGSPRINATGQGVTIFYVDRLGYYPYIDSITGVTVNGGIPQKISLQDHLDKAKKDITFYMPVDNLGMAVIDWEEWRPTWARNWKPKDVYKNRSIELVQQQNVQLSLTEATEKAKHEFEKAGKDFLVETIKLGKLLRPNHLWGYYLFPDCYNHHYKKPGYNGSCFNVEIKRNDDLSWLWNESTALYPSIYLNTQQSPVAATLYVRNRVREAIRVSKIPDAKSPLPVFAYTRIVFTDQVLKFLSQDELVYTFGETVALGASGIVIWGTLSIMRSMKSCLLLDNYMETILNPYIINVTLAAKMCSQVLCQEQGVCIRKNWNSSDYLHLNPDNFAIQLEKGGKFTVRGKPTLEDLEQFSEKFYCSCYSTLSCKEKADVKDTDAVDVCIADGVCIDAFLKPPMETEEPQIFY

SEQ ID NO: 237 - protein, 447 aa, Artificial Sequence
  Mature PH20 36-482 with L at a position corresponding to amino acid residue 208
LNFRAPPVIPNVPFLWAWNAPSEFCLGKFDEPLDMSLFSFIGSPRINATGQGVTIFYVDRLGYYPYIDSITGVTVNGGIPQKISLQDHLDKAKKDITFYMPVDNLGMAVIDWEEWRPTWARNWKPKDVYKNRSIELVQQQNVQLSLTEATEKAKQEFEKAGKDFLVETIKLGKLLRPNHLWGYYLFPDCYNHHYKKPGYNGSCFNVELKRNDDLSWLWNESTALYPSIYLNTQQSPVAATLYVRNRVREAIRVSKIPDAKSPLPVFAYTRIVFTDQVLKFLSQDELVYTFGETVALGASGIVIWGTLSIMRSMKSCLLLDNYMETILNPYIINVTLAAKMCSQVLCQEQGVCIRKNWNSSDYLHLNPDNFAIQLEKGGKFTVRGKPTLEDLEQFSEKFYCSCYSTLSCKEKADVKDTDAVDVCIADGVCIDAFLKPPMETEEPQIFY

SEQ ID NO: 238 - protein, 447 aa, Artificial Sequence
  Mature PH20 36-482 with E at a position corresponding to amino acid residue 446
LNFRAPPVIPNVPFLWAWNAPSEFCLGKFDEPLDMSLFSFIGSPRINATGQGVTIFYVDRLGYYPYIDSITGVTVNGGIPQKISLQDHLDKAKKDITFYMPVDNLGMAVIDWEEWRPTWARNWKPKDVYKNRSIELVQQQNVQLSLTEATEKAKQEFEKAGKDFLVETIKLGKLLRPNHLWGYYLFPDCYNHHYKKPGYNGSCFNVEIKRNDDLSWLWNESTALYPSIYLNTQQSPVAATLYVRNRVREAIRVSKIPDAKSPLPVFAYTRIVFTDQVLKFLSQDELVYTFGETVALGASGIVIWGTLSIMRSMKSCLLLDNYMETILNPYIINVTLAAKMCSQVLCQEQGVCIRKNWNSSDYLHLNPDNFAIQLEKGGKFTVRGKPTLEDLEQFSEKFYCSCYSTLSCKEKADVKDTDAVDVCIADGVCIDAFLKPPMETEEPQIEY

SEQ ID NO: 239 - protein, 447 aa, Artificial Sequence
  Mature PH20 36-482 with G at a position corresponding to amino acid residue 446
LNFRAPPVIPNVPFLWAWNAPSEFCLGKFDEPLDMSLFSFIGSPRINATGQGVTIFYVDRLGYYPYIDSITGVTVNGGIPQKISLQDHLDKAKKDITFYMPVDNLGMAVIDWEEWRPTWARNWKPKDVYKNRSIELVQQQNVQLSLTEATEKAKQEFEKAGKDFLVETIKLGKLLRPNHLWGYYLFPDCYNHHYKKPGYNGSCFNVEIKRNDDLSWLWNESTALYPSIYLNTQQSPVAATLYVRNRVREAIRVSKIPDAKSPLPVFAYTRIVFTDQVLKFLSQDELVYTFGETVALGASGIVIWGTLSIMRSMKSCLLLDNYMETILNPYIINVTLAAKMCSQVLCQEQGVCIRKNWNSSDYLHLNPDNFAIQLEKGGKFTVRGKPTLEDLEQFSEKFYCSCYSTLSCKEKADVKDTDAVDVCIADGVCIDAFLKPPMETEEPQIGY

SEQ ID NO: 240 - protein, 447 aa, Artificial Sequence
  Mature PH20 36-482 with R at a position corresponding to amino acid residue 321
LNFRAPPVIPNVPFLWAWNAPSEFCLGKFDEPLDMSLFSFIGSPRINATGQGVTIFYVDRLGYYPYIDSITGVTVNGGIPQKISLQDHLDKAKKDITFYMPVDNLGMAVIDWEEWRPTWARNWKPKDVYKNRSIELVQQQNVQLSLTEATEKAKQEFEKAGKDFLVETIKLGKLLRPNHLWGYYLFPDCYNHHYKKPGYNGSCFNVEIKRNDDLSWLWNESTALYPSIYLNTQQSPVAATLYVRNRVREAIRVSKIPDAKSPLPVFAYTRIVFTDQVLKFLSQDELVYTFGETVALGASGIVIWGTLSIMRSMKSCLLLDRYMETILNPYIINVTLAAKMCSQVLCQEQGVCIRKNWNSSDYLHLNPDNFAIQLEKGGKFTVRGKPTLEDLEQFSEKFYCSCYSTLSCKEKADVKDTDAVDVCIADGVCIDAFLKPPMETEEPQIFY

SEQ ID NO: 241 - protein, 447 aa, Artificial Sequence
  Mature PH20 36-482 with G at a position corresponding to amino acid residue 48
LNFRAPPVIPNVPFLWAWNAPSEFCLGKFDEPLDMSLFSFIGSPRINGTGQGVTIFYVDRLGYYPYIDSITGVTVNGGIPQKISLQDHLDKAKKDITFYMPVDNLGMAVIDWEEWRPTWARNWKPKDVYKNRSIELVQQQNVQLSLTEATEKAKQEFEKAGKDFLVETIKLGKLLRPNHLWGYYLFPDCYNHHYKKPGYNGSCFNVEIKRNDDLSWLWNESTALYPSIYLNTQQSPVAATLYVRNRVREAIRVSKIPDAKSPLPVFAYTRIVFTDQVLKFLSQDELVYTFGETVALGASGIVIWGTLSIMRSMKSCLLLDNYMETILNPYIINVTLAAKMCSQVLCQEQGVCIRKNWNSSDYLHLNPDNFAIQLEKGGKFTVRGKPTLEDLEQFSEKFYCSCYSTLSCKEKADVKDTDAVDVCIADGVCIDAFLKPPMETEEPQIFY

SEQ ID NO: 242 - protein, 447 aa, Artificial Sequence
  Mature PH20 36-482 with A at a position corresponding to amino acid residue 215
LNFRAPPVIPNVPFLWAWNAPSEFCLGKFDEPLDMSLFSFIGSPRINATGQGVTIFYVDRLGYYPYIDSITGVTVNGGIPQKISLQDHLDKAKKDITFYMPVDNLGMAVIDWEEWRPTWARNWKPKDVYKNRSIELVQQQNVQLSLTEATEKAKQEFEKAGKDFLVETIKLGKLLRPNHLWGYYLFPDCYNHHYKKPGYNGSCFNVEIKRNDDLAWLWNESTALYPSIYLNTQQSPVAATLYVRNRVREAIRVSKIPDAKSPLPVFAYTRIVFTDQVLKFLSQDELVYTFGETVALGASGIVIWGTLSIMRSMKSCLLLDNYMETILNPYIINVTLAAKMCSQVLCQEQGVCIRKNWNSSDYLHLNPDNFAIQLEKGGKFTVRGKPTLEDLEQFSEKFYCSCYSTLSCKEKADVKDTDAVDVCIADGVCIDAFLKPPMETEEPQIFY

SEQ ID NO: 243 - protein, 447 aa, Artificial Sequence
  Mature PH20 36-482 with D at a position corresponding to amino acid residue 215
LNFRAPPVIPNVPFLWAWNAPSEFCLGKFDEPLDMSLFSFIGSPRINATGQGVTIFYVDRLGYYPYIDSITGVTVNGGIPQKISLQDHLDKAKKDITFYMPVDNLGMAVIDWEEWRPTWARNWKPKDVYKNRSIELVQQQNVQLSLTEATEKAKQEFEKAGKDFLVETIKLGKLLRPNHLWGYYLFPDCYNHHYKKPGYNGSCFNVEIKRNDDLDWLWNESTALYPSIYLNTQQSPVAATLYVRNRVREAIRVSKIPDAKSPLPVFAYTRIVFTDQVLKFLSQDELVYTFGETVALGASGIVIWGTLSIMRSMKSCLLLDNYMETILNPYIINVTLAAKMCSQVLCQEQGVCIRKNWNSSDYLHLNPDNFAIQLEKGGKFTVRGKPTLEDLEQFSEKFYCSCYSTLSCKEKADVKDTDAVDVCIADGVCIDAFLKPPMETEEPQIFY

SEQ ID NO: 244 - protein, 447 aa, Artificial Sequence
  Mature PH20 36-482 with P at a position corresponding to amino acid residue 412
LNFRAPPVIPNVPFLWAWNAPSEFCLGKFDEPLDMSLFSFIGSPRINATGQGVTIFYVDRLGYYPYIDSITGVTVNGGIPQKISLQDHLDKAKKDITFYMPVDNLGMAVIDWEEWRPTWARNWKPKDVYKNRSIELVQQQNVQLSLTEATEKAKQEFEKAGKDFLVETIKLGKLLRPNHLWGYYLFPDCYNHHYKKPGYNGSCFNVEIKRNDDLSWLWNESTALYPSIYLNTQQSPVAATLYVRNRVREAIRVSKIPDAKSPLPVFAYTRIVFTDQVLKFLSQDELVYTFGETVALGASGIVIWGTLSIMRSMKSCLLLDNYMETILNPYIINVTLAAKMCSQVLCQEQGVCIRKNWNSSDYLHLNPDNFAIQLEKGGKFTVRGKPTLEDLEQFSEKFYCSCYSTLSCKEKPDVKDTDAVDVCIADGVCIDAFLKPPMETEEPQIFY

SEQ ID NO: 245 - protein, 447 aa, Artificial Sequence
  Mature PH20 36-482 with S at a position corresponding to amino acid residue 412
LNFRAPPVIPNVPFLWAWNAPSEFCLGKFDEPLDMSLFSFIGSPRINATGQGVTIFYVDRLGYYPYIDSITGVTVNGGIPQKISLQDHLDKAKKDITFYMPVDNLGMAVIDWEEWRPTWARNWKPKDVYKNRSIELVQQQNVQLSLTEATEKAKQEFEKAGKDFLVETIKLGKLLRPNHLWGYYLFPDCYNHHYKKPGYNGSCFNVEIKRNDDLSWLWNESTALYPSIYLNTQQSPVAATLYVRNRVREAIRVSKIPDAKSPLPVFAYTRIVFTDQVLKFLSQDELVYTFGETVALGASGIVIWGTLSIMRSMKSCLLLDNYMETILNPYIINVTLAAKMCSQVLCQEQGVCIRKNWNSSDYLHLNPDNFAIQLEKGGKFTVRGKPTLEDLEQFSEKFYCSCYSTLSCKEKSDVKDTDAVDVCIADGVCIDAFLKPPMETEEPQIFY

SEQ ID NO: 246 - protein, 447 aa, Artificial Sequence
  Mature PH20 36-482 with T at a position corresponding to amino acid residue 215
LNFRAPPVIPNVPFLWAWNAPSEFCLGKFDEPLDMSLFSFIGSPRINATGQGVTIFYVDRLGYYPYIDSITGVTVNGGIPQKISLQDHLDKAKKDITFYMPVDNLGMAVIDWEEWRPTWARNWKPKDVYKNRSIELVQQQNVQLSLTEATEKAKQEFEKAGKDFLVETIKLGKLLRPNHLWGYYLFPDCYNHHYKKPGYNGSCFNVEIKRNDDLTWLWNESTALYPSIYLNTQQSPVAATLYVRNRVREAIRVSKIPDAKSPLPVFAYTRIVFTDQVLKFLSQDELVYTFGETVALGASGIVIWGTLSIMRSMKSCLLLDNYMETILNPYIINVTLAAKMCSQVLCQEQGVCIRKNWNSSDYLHLNPDNFAIQLEKGGKFTVRGKPTLEDLEQFSEKFYCSCYSTLSCKEKADVKDTDAVDVCIADGVCIDAFLKPPMETEEPQIFY

SEQ ID NO: 247 - protein, 447 aa, Artificial Sequence
  Mature PH20 36-482 with V at a position corresponding to amino acid residue 215
LNFRAPPVIPNVPFLWAWNAPSEFCLGKFDEPLDMSLFSFIGSPRINATGQGVTIFYVDRLGYYPYIDSITGVTVNGGIPQKISLQDHLDKAKKDITFYMPVDNLGMAVIDWEEWRPTWARNWKPKDVYKNRSIELVQQQNVQLSLTEATEKAKQEFEKAGKDFLVETIKLGKLLRPNHLWGYYLFPDCYNHHYKKPGYNGSCFNVEIKRNDDLVWLWNESTALYPSIYLNTQQSPVAATLYVRNRVREAIRVSKIPDAKSPLPVFAYTRIVFTDQVLKFLSQDELVYTFGETVALGASGIVIWGTLSIMRSMKSCLLLDNYMETILNPYIINVTLAAKMCSQVLCQEQGVCIRKNWNSSDYLHLNPDNFAIQLEKGGKFTVRGKPTLEDLEQFSEKFYCSCYSTLSCKEKADVKDTDAVDVCIADGVCIDAFLKPPMETEEPQIFY

SEQ ID NO: 248 - protein, 447 aa, Artificial Sequence
  Mature PH20 36-482 with W at a position corresponding to amino acid residue 215
LNFRAPPVIPNVPFLWAWNAPSEFCLGKFDEPLDMSLFSFIGSPRINATGQGVTIFYVDRLGYYPYIDSITGVTVNGGIPQKISLQDHLDKAKKDITFYMPVDNLGMAVIDWEEWRPTWARNWKPKDVYKNRSIELVQQQNVQLSLTEATEKAKQEFEKAGKDFLVETIKLGKLLRPNHLWGYYLFPDCYNHHYKKPGYNGSCFNVEIKRNDDLWWLWNESTALYPSIYLNTQQSPVAATLYVRNRVREAIRVSKIPDAKSPLPVFAYTRIVFTDQVLKFLSQDELVYTFGETVALGASGIVIWGTLSIMRSMKSCLLLDNYMETILNPYIINVTLAAKMCSQVLCQEQGVCIRKNWNSSDYLHLNPDNFAIQLEKGGKFTVRGKPTLEDLEQFSEKFYCSCYSTLSCKEKADVKDTDAVDVCIADGVCIDAFLKPPMETEEPQIFY

SEQ ID NO: 249 - protein, 447 aa, Artificial Sequence
  Mature PH20 36-482 with A at a position corresponding to amino acid residue 219
LNFRAPPVIPNVPFLWAWNAPSEFCLGKFDEPLDMSLFSFIGSPRINATGQGVTIFYVDRLGYYPYIDSITGVTVNGGIPQKISLQDHLDKAKKDITFYMPVDNLGMAVIDWEEWRPTWARNWKPKDVYKNRSIELVQQQNVQLSLTEATEKAKQEFEKAGKDFLVETIKLGKLLRPNHLWGYYLFPDCYNHHYKKPGYNGSCFNVEIKRNDDLSWLWAESTALYPSIYLNTQQSPVAATLYVRNRVREAIRVSKIPDAKSPLPVFAYTRIVFTDQVLKFLSQDELVYTFGETVALGASGIVIWGTLSIMRSMKSCLLLDNYMETILNPYIINVTLAAKMCSQVLCQEQGVCIRKNWNSSDYLHLNPDNFAIQLEKGGKFTVRGKPTLEDLEQFSEKFYCSCYSTLSCKEKADVKDTDAVDVCIADGVCIDAFLKPPMETEEPQIFY

SEQ ID NO: 250 - protein, 447 aa, Artificial Sequence
  Mature PH20 36-482 with R at a position corresponding to amino acid residue 219
LNFRAPPVIPNVPFLWAWNAPSEFCLGKFDEPLDMSLFSFIGSPRINATGQGVTIFYVDRLGYYPYIDSITGVTVNGGIPQKISLQDHLDKAKKDITFYMPVDNLGMAVIDWEEWRPTWARNWKPKDVYKNRSIELVQQQNVQLSLTEATEKAKQEFEKAGKDFLVETIKLGKLLRPNHLWGYYLFPDCYNHHYKKPGYNGSCFNVEIKRNDDLSWLWRESTALYPSIYLNTQQSPVAATLYVRNRVREAIRVSKIPDAKSPLPVFAYTRIVFTDQVLKFLSQDELVYTFGETVALGASGIVIWGTLSIMRSMKSCLLLDNYMETILNPYIINVTLAAKMCSQVLCQEQGVCIRKNWNSSDYLHLNPDNFAIQLEKGGKFTVRGKPTLEDLEQFSEKFYCSCYSTLSCKEKADVKDTDAVDVCIADGVCIDAFLKPPMETEEPQIFY

SEQ ID NO: 251 - protein, 447 aa, Artificial Sequence
  Mature PH20 36-482 with S at a position corresponding to amino acid residue 219
LNFRAPPVIPNVPFLWAWNAPSEFCLGKFDEPLDMSLFSFIGSPRINATGQGVTIFYVDRLGYYPYIDSITGVTVNGGIPQKISLQDHLDKAKKDITFYMPVDNLGMAVIDWEEWRPTWARNWKPKDVYKNRSIELVQQQNVQLSLTEATEKAKQEFEKAGKDFLVETIKLGKLLRPNHLWGYYLFPDCYNHHYKKPGYNGSCFNVEIKRNDDLSWLWSESTALYPSIYLNTQQSPVAATLYVRNRVREAIRVSKIPDAKSPLPVFAYTRIVFTDQVLKFLSQDELVYTFGETVALGASGIVIWGTLSIMRSMKSCLLLDNYMETILNPYIINVTLAAKMCSQVLCQEQGVCIRKNWNSSDYLHLNPDNFAIQLEKGGKFTVRGKPTLEDLEQFSEKFYCSCYSTLSCKEKADVKDTDAVDVCIADGVCIDAFLKPPMETEEPQIFY

SEQ ID NO: 252 - protein, 447 aa, Artificial Sequence
  Mature PH20 36-482 with T at a position corresponding to amino acid residue 219
LNFRAPPVIPNVPFLWAWNAPSEFCLGKFDEPLDMSLFSFIGSPRINATGQGVTIFYVDRLGYYPYIDSITGVTVNGGIPQKISLQDHLDKAKKDITFYMPVDNLGMAVIDWEEWRPTWARNWKPKDVYKNRSIELVQQQNVQLSLTEATEKAKQEFEKAGKDFLVETIKLGKLLRPNHLWGYYLFPDCYNHHYKKPGYNGSCFNVEIKRNDDLSWLWTESTALYPSIYLNTQQSPVAATLYVRNRVREAIRVSKIPDAKSPLPVFAYTRIVFTDQVLKFLSQDELVYTFGETVALGASGIVIWGTLSIMRSMKSCLLLDNYMETILNPYIINVTLAAKMCSQVLCQEQGVCIRKNWNSSDYLHLNPDNFAIQLEKGGKFTVRGKPTLEDLEQFSEKFYCSCYSTLSCKEKADVKDTDAVDVCIADGVCIDAFLKPPMETEEPQIFY

SEQ ID NO: 253 - protein, 447 aa, Artificial Sequence
  Mature PH20 36-482 with A at a position corresponding to amino acid residue 321
LNFRAPPVIPNVPFLWAWNAPSEFCLGKFDEPLDMSLFSFIGSPRINATGQGVTIFYVDRLGYYPYIDSITGVTVNGGIPQKISLQDHLDKAKKDITFYMPVDNLGMAVIDWEEWRPTWARNWKPKDVYKNRSIELVQQQNVQLSLTEATEKAKQEFEKAGKDFLVETIKLGKLLRPNHLWGYYLFPDCYNHHYKKPGYNGSCFNVEIKRNDDLSWLWNESTALYPSIYLNTQQSPVAATLYVRNRVREAIRVSKIPDAKSPLPVFAYTRIVFTDQVLKFLSQDELVYTFGETVALGASGIVIWGTLSIMRSMKSCLLLDAYMETILNPYIINVTLAAKMCSQVLCQEQGVCIRKNWNSSDYLHLNPDNFAIQLEKGGKFTVRGKPTLEDLEQFSEKFYCSCYSTLSCKEKADVKDTDAVDVCIADGVCIDAFLKPPMETEEPQIFY

SEQ ID NO: 254 - protein, 447 aa, Artificial Sequence
  Mature PH20 36-482 with M at a position corresponding to amino acid residue 234
LNFRAPPVIPNVPFLWAWNAPSEFCLGKFDEPLDMSLFSFIGSPRINATGQGVTIFYVDRLGYYPYIDSITGVTVNGGIPQKISLQDHLDKAKKDITFYMPVDNLGMAVIDWEEWRPTWARNWKPKDVYKNRSIELVQQQNVQLSLTEATEKAKQEFEKAGKDFLVETIKLGKLLRPNHLWGYYLFPDCYNHHYKKPGYNGSCFNVEIKRNDDLSWLWNESTALYPSIYLNTQMSPVAATLYVRNRVREAIRVSKIPDAKSPLPVFAYTRIVFTDQVLKFLSQDELVYTFGETVALGASGIVIWGTLSIMRSMKSCLLLDNYMETILNPYIINVTLAAKMCSQVLCQEQGVCIRKNWNSSDYLHLNPDNFAIQLEKGGKFTVRGKPTLEDLEQFSEKFYCSCYSTLSCKEKADVKDTDAVDVCIADGVCIDAFLKPPMETEEPQIFY

SEQ ID NO: 255 - protein, 447 aa, Artificial Sequence
  Mature PH20 36-482 with N at a position corresponding to amino acid residue 278
LNFRAPPVIPNVPFLWAWNAPSEFCLGKFDEPLDMSLFSFIGSPRINATGQGVTIFYVDRLGYYPYIDSITGVTVNGGIPQKISLQDHLDKAKKDITFYMPVDNLGMAVIDWEEWRPTWARNWKPKDVYKNRSIELVQQQNVQLSLTEATEKAKQEFEKAGKDFLVETIKLGKLLRPNHLWGYYLFPDCYNHHYKKPGYNGSCFNVEIKRNDDLSWLWNESTALYPSIYLNTQQSPVAATLYVRNRVREAIRVSKIPDAKSPLPVFAYTRIVFTDQVNKFLSQDELVYTFGETVALGASGIVIWGTLSIMRSMKSCLLLDNYMETILNPYIINVTLAAKMCSQVLCQEQGVCIRKNWNSSDYLHLNPDNFAIQLEKGGKFTVRGKPTLEDLEQFSEKFYCSCYSTLSCKEKADVKDTDAVDVCIADGVCIDAFLKPPMETEEPQIFY

SEQ ID NO: 256 - protein, 447 aa, Artificial Sequence
  Mature PH20 36-482 with D at a position corresponding to amino acid residue 306
LNFRAPPVIPNVPFLWAWNAPSEFCLGKFDEPLDMSLFSFIGSPRINATGQGVTIFYVDRLGYYPYIDSITGVTVNGGIPQKISLQDHLDKAKKDITFYMPVDNLGMAVIDWEEWRPTWARNWKPKDVYKNRSIELVQQQNVQLSLTEATEKAKQEFEKAGKDFLVETIKLGKLLRPNHLWGYYLFPDCYNHHYKKPGYNGSCFNVEIKRNDDLSWLWNESTALYPSIYLNTQQSPVAATLYVRNRVREAIRVSKIPDAKSPLPVFAYTRIVFTDQVLKFLSQDELVYTFGETVALGASGIVIWGDLSIMRSMKSCLLLDNYMETILNPYIINVTLAAKMCSQVLCQEQGVCIRKNWNSSDYLHLNPDNFAIQLEKGGKFTVRGKPTLEDLEQFSEKFYCSCYSTLSCKEKADVKDTDAVDVCIADGVCIDAFLKPPMETEEPQIFY

SEQ ID NO: 257 - protein, 447 aa, Artificial Sequence
  Mature PH20 36-482 with D at a position corresponding to amino acid residue 84
LNFRAPPVIPNVPFLWAWNAPSEFCLGKFDEPLDMSLFSFIGSPRINATGQGVTIFYVDRLGYYPYIDSITGVTVNGGIPQKIDLQDHLDKAKKDITFYMPVDNLGMAVIDWEEWRPTWARNWKPKDVYKNRSIELVQQQNVQLSLTEATEKAKQEFEKAGKDFLVETIKLGKLLRPNHLWGYYLFPDCYNHHYKKPGYNGSCFNVEIKRNDDLSWLWNESTALYPSIYLNTQQSPVAATLYVRNRVREAIRVSKIPDAKSPLPVFAYTRIVFTDQVLKFLSQDELVYTFGETVALGASGIVIWGTLSIMRSMKSCLLLDNYMETILNPYIINVTLAAKMCSQVLCQEQGVCIRKNWNSSDYLHLNPDNFAIQLEKGGKFTVRGKPTLEDLEQFSEKFYCSCYSTLSCKEKADVKDTDAVDVCIADGVCIDAFLKPPMETEEPQIFY

SEQ ID NO: 258 - protein, 447 aa, Artificial Sequence
  Mature PH20 36-482 with Q at a position corresponding to amino acid residue 83
LNFRAPPVIPNVPFLWAWNAPSEFCLGKFDEPLDMSLFSFIGSPRINATGQGVTIFYVDRLGYYPYIDSITGVTVNGGIPQKQSLQDHLDKAKKDITFYMPVDNLGMAVIDWEEWRPTWARNWKPKDVYKNRSIELVQQQNVQLSLTEATEKAKQEFEKAGKDFLVETIKLGKLLRPNHLWGYYLFPDCYNHHYKKPGYNGSCFNVEIKRNDDLSWLWNESTALYPSIYLNTQQSPVAATLYVRNRVREAIRVSKIPDAKSPLPVFAYTRIVFTDQVLKFLSQDELVYTFGETVALGASGIVIWGTLSIMRSMKSCLLLDNYMETILNPYIINVTLAAKMCSQVLCQEQGVCIRKNWNSSDYLHLNPDNFAIQLEKGGKFTVRGKPTLEDLEQFSEKFYCSCYSTLSCKEKADVKDTDAVDVCIADGVCIDAFLKPPMETEEPQIFY

SEQ ID NO: 259 - protein, 447 aa, Artificial Sequence
  Mature PH20 36-482 with H at a position corresponding to amino acid residue 27
LNFRAPPVIPNVPFLWAWNAPSEFCLHKFDEPLDMSLFSFIGSPRINATGQGVTIFYVDRLGYYPYIDSITGVTVNGGIPQKISLQDHLDKAKKDITFYMPVDNLGMAVIDWEEWRPTWARNWKPKDVYKNRSIELVQQQNVQLSLTEATEKAKQEFEKAGKDFLVETIKLGKLLRPNHLWGYYLFPDCYNHHYKKPGYNGSCFNVEIKRNDDLSWLWNESTALYPSIYLNTQQSPVAATLYVRNRVREAIRVSKIPDAKSPLPVFAYTRIVFTDQVLKFLSQDELVYTFGETVALGASGIVIWGTLSIMRSMKSCLLLDNYMETILNPYIINVTLAAKMCSQVLCQEQGVCIRKNWNSSDYLHLNPDNFAIQLEKGGKFTVRGKPTLEDLEQFSEKFYCSCYSTLSCKEKADVKDTDAVDVCIADGVCIDAFLKPPMETEEPQIFY

SEQ ID NO: 260 - protein, 447 aa, Artificial Sequence
  Mature PH20 36-482 with Q at a position corresponding to amino acid residue 413
LNFRAPPVIPNVPFLWAWNAPSEFCLGKFDEPLDMSLFSFIGSPRINATGQGVTIFYVDRLGYYPYIDSITGVTVNGGIPQKISLQDHLDKAKKDITFYMPVDNLGMAVIDWEEWRPTWARNWKPKDVYKNRSIELVQQQNVQLSLTEATEKAKQEFEKAGKDFLVETIKLGKLLRPNHLWGYYLFPDCYNHHYKKPGYNGSCFNVEIKRNDDLSWLWNESTALYPSIYLNTQQSPVAATLYVRNRVREAIRVSKIPDAKSPLPVFAYTRIVFTDQVLKFLSQDELVYTFGETVALGASGIVIWGTLSIMRSMKSCLLLDNYMETILNPYIINVTLAAKMCSQVLCQEQGVCIRKNWNSSDYLHLNPDNFAIQLEKGGKFTVRGKPTLEDLEQFSEKFYCSCYSTLSCKEKAQVKDTDAVDVCIADGVCIDAFLKPPMETEEPQIFY

SEQ ID NO: 261 - protein, 447 aa, Artificial Sequence
  Mature PH20 36-482 with R at a position corresponding to amino acid residue 255
LNFRAPPVIPNVPFLWAWNAPSEFCLGKFDEPLDMSLFSFIGSPRINATGQGVTIFYVDRLGYYPYIDSITGVTVNGGIPQKISLQDHLDKAKKDITFYMPVDNLGMAVIDWEEWRPTWARNWKPKDVYKNRSIELVQQQNVQLSLTEATEKAKQEFEKAGKDFLVETIKLGKLLRPNHLWGYYLFPDCYNHHYKKPGYNGSCFNVEIKRNDDLSWLWNESTALYPSIYLNTQQSPVAATLYVRNRVREAIRVSRIPDAKSPLPVFAYTRIVFTDQVLKFLSQDELVYTFGETVALGASGIVIWGTLSIMRSMKSCLLLDNYMETILNPYIINVTLAAKMCSQVLCQEQGVCIRKNWNSSDYLHLNPDNFAIQLEKGGKFTVRGKPTLEDLEQFSEKFYCSCYSTLSCKEKADVKDTDAVDVCIADGVCIDAFLKPPMETEEPQIFY

SEQ ID NO: 262 - protein, 447 aa, Artificial Sequence
  Mature PH20 36-482 with M at a position corresponding to amino acid residue 251
LNFRAPPVIPNVPFLWAWNAPSEFCLGKFDEPLDMSLFSFIGSPRINATGQGVTIFYVDRLGYYPYIDSITGVTVNGGIPQKISLQDHLDKAKKDITFYMPVDNLGMAVIDWEEWRPTWARNWKPKDVYKNRSIELVQQQNVQLSLTEATEKAKQEFEKAGKDFLVETIKLGKLLRPNHLWGYYLFPDCYNHHYKKPGYNGSCFNVEIKRNDDLSWLWNESTALYPSIYLNTQQSPVAATLYVRNRVREAMRVSKIPDAKSPLPVFAYTRIVFTDQVLKFLSQDELVYTFGETVALGASGIVIWGTLSIMRSMKSCLLLDNYMETILNPYIINVTLAAKMCSQVLCQEQGVCIRKNWNSSDYLHLNPDNFAIQLEKGGKFTVRGKPTLEDLEQFSEKFYCSCYSTLSCKEKADVKDTDAVDVCIADGVCIDAFLKPPMETEEPQIFY

SEQ ID NO: 263 - protein, 447 aa, Artificial Sequence
  Mature PH20 36-482 with G at a position corresponding to amino acid residue 260
LNFRAPPVIPNVPFLWAWNAPSEFCLGKFDEPLDMSLFSFIGSPRINATGQGVTIFYVDRLGYYPYIDSITGVTVNGGIPQKISLQDHLDKAKKDITFYMPVDNLGMAVIDWEEWRPTWARNWKPKDVYKNRSIELVQQQNVQLSLTEATEKAKQEFEKAGKDFLVETIKLGKLLRPNHLWGYYLFPDCYNHHYKKPGYNGSCFNVEIKRNDDLSWLWNESTALYPSIYLNTQQSPVAATLYVRNRVREAIRVSKIPDAGSPLPVFAYTRIVFTDQVLKFLSQDELVYTFGETVALGASGIVIWGTLSIMRSMKSCLLLDNYMETILNPYIINVTLAAKMCSQVLCQEQGVCIRKNWNSSDYLHLNPDNFAIQLEKGGKFTVRGKPTLEDLEQFSEKFYCSCYSTLSCKEKADVKDTDAVDVCIADGVCIDAFLKPPMETEEPQIFY

SEQ ID NO: 264 - protein, 447 aa, Artificial Sequence
  Mature PH20 36-482 with S at a position corresponding to amino acid residue 155
LNFRAPPVIPNVPFLWAWNAPSEFCLGKFDEPLDMSLFSFIGSPRINATGQGVTIFYVDRLGYYPYIDSITGVTVNGGIPQKISLQDHLDKAKKDITFYMPVDNLGMAVIDWEEWRPTWARNWKPKDVYKNRSIELVQQQNVQLSLTEATEKAKSEFEKAGKDFLVETIKLGKLLRPNHLWGYYLFPDCYNHHYKKPGYNGSCFNVEIKRNDDLSWLWNESTALYPSIYLNTQQSPVAATLYVRNRVREAIRVSKIPDAKSPLPVFAYTRIVFTDQVLKFLSQDELVYTFGETVALGASGIVIWGTLSIMRSMKSCLLLDNYMETILNPYIINVTLAAKMCSQVLCQEQGVCIRKNWNSSDYLHLNPDNFAIQLEKGGKFTVRGKPTLEDLEQFSEKFYCSCYSTLSCKEKADVKDTDAVDVCIADGVCIDAFLKPPMETEEPQIFY

SEQ ID NO: 265 - protein, 447 aa, Artificial Sequence
  Mature PH20 36-482 with I at a position corresponding to amino acid residue 247
LNFRAPPVIPNVPFLWAWNAPSEFCLGKFDEPLDMSLFSFIGSPRINATGQGVTIFYVDRLGYYPYIDSITGVTVNGGIPQKISLQDHLDKAKKDITFYMPVDNLGMAVIDWEEWRPTWARNWKPKDVYKNRSIELVQQQNVQLSLTEATEKAKQEFEKAGKDFLVETIKLGKLLRPNHLWGYYLFPDCYNHHYKKPGYNGSCFNVEIKRNDDLSWLWNESTALYPSIYLNTQQSPVAATLYVRNRIREAIRVSKIPDAKSPLPVFAYTRIVFTDQVLKFLSQDELVYTFGETVALGASGIVIWGTLSIMRSMKSCLLLDNYMETILNPYIINVTLAAKMCSQVLCQEQGVCIRKNWNSSDYLHLNPDNFAIQLEKGGKFTVRGKPTLEDLEQFSEKFYCSCYSTLSCKEKADVKDTDAVDVCIADGVCIDAFLKPPMETEEPQIFY

SEQ ID NO: 266 - protein, 447 aa, Artificial Sequence
  Mature PH20 36-482 with N at a position corresponding to amino acid residue 317
LNFRAPPVIPNVPFLWAWNAPSEFCLGKFDEPLDMSLFSFIGSPRINATGQGVTIFYVDRLGYYPYIDSITGVTVNGGIPQKISLQDHLDKAKKDITFYMPVDNLGMAVIDWEEWRPTWARNWKPKDVYKNRSIELVQQQNVQLSLTEATEKAKQEFEKAGKDFLVETIKLGKLLRPNHLWGYYLFPDCYNHHYKKPGYNGSCFNVEIKRNDDLSWLWNESTALYPSIYLNTQQSPVAATLYVRNRVREAIRVSKIPDAKSPLPVFAYTRIVFTDQVLKFLSQDELVYTFGETVALGASGIVIWGTLSIMRSMKSCNLLDNYMETILNPYIINVTLAAKMCSQVLCQEQGVCIRKNWNSSDYLHLNPDNFAIQLEKGGKFTVRGKPTLEDLEQFSEKFYCSCYSTLSCKEKADVKDTDAVDVCIADGVCIDAFLKPPMETEEPQIFY

SEQ ID NO: 267 - protein, 447 aa, Artificial Sequence
  Mature PH20 36-482 with H at a position corresponding to amino acid residue 29
LNFRAPPVIPNVPFLWAWNAPSEFCLGKHDEPLDMSLFSFIGSPRINATGQGVTIFYVDRLGYYPYIDSITGVTVNGGIPQKISLQDHLDKAKKDITFYMPVDNLGMAVIDWEEWRPTWARNWKPKDVYKNRSIELVQQQNVQLSLTEATEKAKQEFEKAGKDFLVETIKLGKLLRPNHLWGYYLFPDCYNHHYKKPGYNGSCFNVEIKRNDDLSWLWNESTALYPSIYLNTQQSPVAATLYVRNRVREAIRVSKIPDAKSPLPVFAYTRIVFTDQVLKFLSQDELVYTFGETVALGASGIVIWGTLSIMRSMKSCLLLDNYMETILNPYIINVTLAAKMCSQVLCQEQGVCIRKNWNSSDYLHLNPDNFAIQLEKGGKFTVRGKPTLEDLEQFSEKFYCSCYSTLSCKEKADVKDTDAVDVCIADGVCIDAFLKPPMETEEPQIFY

SEQ ID NO: 268 - protein, 447 aa, Artificial Sequence
  Mature PH20 36-482 with I at a position corresponding to amino acid residue 265
LNFRAPPVIPNVPFLWAWNAPSEFCLGKFDEPLDMSLFSFIGSPRINATGQGVTIFYVDRLGYYPYIDSITGVTVNGGIPQKISLQDHLDKAKKDITFYMPVDNLGMAVIDWEEWRPTWARNWKPKDVYKNRSIELVQQQNVQLSLTEATEKAKQEFEKAGKDFLVETIKLGKLLRPNHLWGYYLFPDCYNHHYKKPGYNGSCFNVEIKRNDDLSWLWNESTALYPSIYLNTQQSPVAATLYVRNRVREAIRVSKIPDAKSPLPIFAYTRIVFTDQVLKFLSQDELVYTFGETVALGASGIVIWGTLSIMRSMKSCLLLDNYMETILNPYIINVTLAAKMCSQVLCQEQGVCIRKNWNSSDYLHLNPDNFAIQLEKGGKFTVRGKPTLEDLEQFSEKFYCSCYSTLSCKEKADVKDTDAVDVCIADGVCIDAFLKPPMETEEPQIFY

SEQ ID NO: 269 - protein, 447 aa, Artificial Sequence
  Mature PH20 36-482 with I at a position corresponding to amino acid residue 206
LNFRAPPVIPNVPFLWAWNAPSEFCLGKFDEPLDMSLFSFIGSPRINATGQGVTIFYVDRLGYYPYIDSITGVTVNGGIPQKISLQDHLDKAKKDITFYMPVDNLGMAVIDWEEWRPTWARNWKPKDVYKNRSIELVQQQNVQLSLTEATEKAKQEFEKAGKDFLVETIKLGKLLRPNHLWGYYLFPDCYNHHYKKPGYNGSCFNIEIKRNDDLSWLWNESTALYPSIYLNTQQSPVAATLYVRNRVREAIRVSKIPDAKSPLPVFAYTRIVFTDQVLKFLSQDELVYTFGETVALGASGIVIWGTLSIMRSMKSCLLLDNYMETILNPYIINVTLAAKMCSQVLCQEQGVCIRKNWNSSDYLHLNPDNFAIQLEKGGKFTVRGKPTLEDLEQFSEKFYCSCYSTLSCKEKADVKDTDAVDVCIADGVCIDAFLKPPMETEEPQIFY

SEQ ID NO: 270 - protein, 447 aa, Artificial Sequence
  Mature PH20 36-482 with T at a position corresponding to amino acid residue 377
LNFRAPPVIPNVPFLWAWNAPSEFCLGKFDEPLDMSLFSFIGSPRINATGQGVTIFYVDRLGYYPYIDSITGVTVNGGIPQKISLQDHLDKAKKDITFYMPVDNLGMAVIDWEEWRPTWARNWKPKDVYKNRSIELVQQQNVQLSLTEATEKAKQEFEKAGKDFLVETIKLGKLLRPNHLWGYYLFPDCYNHHYKKPGYNGSCFNVEIKRNDDLSWLWNESTALYPSIYLNTQQSPVAATLYVRNRVREAIRVSKIPDAKSPLPVFAYTRIVFTDQVLKFLSQDELVYTFGETVALGASGIVIWGTLSIMRSMKSCLLLDNYMETILNPYIINVTLAAKMCSQVLCQEQGVCIRKNWNSSDYLHLNPDNFAIQLEKTGKFTVRGKPTLEDLEQFSEKFYCSCYSTLSCKEKADVKDTDAVDVCIADGVCIDAFLKPPMETEEPQIFY

SEQ ID NO: 271 - protein, 447 aa, Artificial Sequence
  Mature PH20 36-482 with M at a position corresponding to amino acid residue 421
LNFRAPPVIPNVPFLWAWNAPSEFCLGKFDEPLDMSLFSFIGSPRINATGQGVTIFYVDRLGYYPYIDSITGVTVNGGIPQKISLQDHLDKAKKDITFYMPVDNLGMAVIDWEEWRPTWARNWKPKDVYKNRSIELVQQQNVQLSLTEATEKAKQEFEKAGKDFLVETIKLGKLLRPNHLWGYYLFPDCYNHHYKKPGYNGSCFNVEIKRNDDLSWLWNESTALYPSIYLNTQQSPVAATLYVRNRVREAIRVSKIPDAKSPLPVFAYTRIVFTDQVLKFLSQDELVYTFGETVALGASGIVIWGTLSIMRSMKSCLLLDNYMETILNPYIINVTLAAKMCSQVLCQEQGVCIRKNWNSSDYLHLNPDNFAIQLEKGGKFTVRGKPTLEDLEQFSEKFYCSCYSTLSCKEKADVKDTDAVMVCIADGVCIDAFLKPPMETEEPQIFY

SEQ ID NO: 272 - protein, 447 aa, Artificial Sequence
  Mature PH20 36-482 with D at a position corresponding to amino acid residue 155
LNFRAPPVIPNVPFLWAWNAPSEFCLGKFDEPLDMSLFSFIGSPRINATGQGVTIFYVDRLGYYPYIDSITGVTVNGGIPQKISLQDHLDKAKKDITFYMPVDNLGMAVIDWEEWRPTWARNWKPKDVYKNRSIELVQQQNVQLSLTEATEKAKDEFEKAGKDFLVETIKLGKLLRPNHLWGYYLFPDCYNHHYKKPGYNGSCFNVEIKRNDDLSWLWNESTALYPSIYLNTQQSPVAATLYVRNRVREAIRVSKIPDAKSPLPVFAYTRIVFTDQVLKFLSQDELVYTFGETVALGASGIVIWGTLSIMRSMKSCLLLDNYMETILNPYIINVTLAAKMCSQVLCQEQGVCIRKNWNSSDYLHLNPDNFAIQLEKGGKFTVRGKPTLEDLEQFSEKFYCSCYSTLSCKEKADVKDTDAVDVCIADGVCIDAFLKPPMETEEPQIFY

SEQ ID NO: 273 - protein, 447 aa, Artificial Sequence
  Mature PH20 36-482 with E at a position corresponding to amino acid residue 277
LNFRAPPVIPNVPFLWAWNAPSEFCLGKFDEPLDMSLFSFIGSPRINATGQGVTIFYVDRLGYYPYIDSITGVTVNGGIPQKISLQDHLDKAKKDITFYMPVDNLGMAVIDWEEWRPTWARNWKPKDVYKNRSIELVQQQNVQLSLTEATEKAKQEFEKAGKDFLVETIKLGKLLRPNHLWGYYLFPDCYNHHYKKPGYNGSCFNVEIKRNDDLSWLWNESTALYPSIYLNTQQSPVAATLYVRNRVREAIRVSKIPDAKSPLPVFAYTRIVFTDQELKFLSQDELVYTFGETVALGASGIVIWGTLSIMRSMKSCLLLDNYMETILNPYIINVTLAAKMCSQVLCQEQGVCIRKNWNSSDYLHLNPDNFAIQLEKGGKFTVRGKPTLEDLEQFSEKFYCSCYSTLSCKEKADVKDTDAVDVCIADGVCIDAFLKPPMETEEPQIFY

SEQ ID NO: 274 - protein, 447 aa, Artificial Sequence
  Mature PH20 36-482 with H at a position corresponding to amino acid residue 277
LNFRAPPVIPNVPFLWAWNAPSEFCLGKFDEPLDMSLFSFIGSPRINATGQGVTIFYVDRLGYYPYIDSITGVTVNGGIPQKISLQDHLDKAKKDITFYMPVDNLGMAVIDWEEWRPTWARNWKPKDVYKNRSIELVQQQNVQLSLTEATEKAKQEFEKAGKDFLVETIKLGKLLRPNHLWGYYLFPDCYNHHYKKPGYNGSCFNVEIKRNDDLSWLWNESTALYPSIYLNTQQSPVAATLYVRNRVREAIRVSKIPDAKSPLPVFAYTRIVFTDQHLKFLSQDELVYTFGETVALGASGIVIWGTLSIMRSMKSCLLLDNYMETILNPYIINVTLAAKMCSQVLCQEQGVCIRKNWNSSDYLHLNPDNFAIQLEKGGKFTVRGKPTLEDLEQFSEKFYCSCYSTLSCKEKADVKDTDAVDVCIADGVCIDAFLKPPMETEEPQIFY

SEQ ID NO: 275 - protein, 447 aa, Artificial Sequence
  Mature PH20 36-482 with G at a position corresponding to amino acid residue 278
LNFRAPPVIPNVPFLWAWNAPSEFCLGKFDEPLDMSLFSFIGSPRINATGQGVTIFYVDRLGYYPYIDSITGVTVNGGIPQKISLQDHLDKAKKDITFYMPVDNLGMAVIDWEEWRPTWARNWKPKDVYKNRSIELVQQQNVQLSLTEATEKAKQEFEKAGKDFLVETIKLGKLLRPNHLWGYYLFPDCYNHHYKKPGYNGSCFNVEIKRNDDLSWLWNESTALYPSIYLNTQQSPVAATLYVRNRVREAIRVSKIPDAKSPLPVFAYTRIVFTDQVGKFLSQDELVYTFGETVALGASGIVIWGTLSIMRSMKSCLLLDNYMETILNPYIINVTLAAKMCSQVLCQEQGVCIRKNWNSSDYLHLNPDNFAIQLEKGGKFTVRGKPTLEDLEQFSEKFYCSCYSTLSCKEKADVKDTDAVDVCIADGVCIDAFLKPPMETEEPQIFY

SEQ ID NO: 276 - protein, 447 aa, Artificial Sequence
  Mature PH20 36-482 with H at a position corresponding to amino acid residue 278
LNFRAPPVIPNVPFLWAWNAPSEFCLGKFDEPLDMSLFSFIGSPRINATGQGVTIFYVDRLGYYPYIDSITGVTVNGGIPQKISLQDHLDKAKKDITFYMPVDNLGMAVIDWEEWRPTWARNWKPKDVYKNRSIELVQQQNVQLSLTEATEKAKQEFEKAGKDFLVETIKLGKLLRPNHLWGYYLFPDCYNHHYKKPGYNGSCFNVEIKRNDDLSWLWNESTALYPSIYLNTQQSPVAATLYVRNRVREAIRVSKIPDAKSPLPVFAYTRIVFTDQVHKFLSQDELVYTFGETVALGASGIVIWGTLSIMRSMKSCLLLDNYMETILNPYIINVTLAAKMCSQVLCQEQGVCIRKNWNSSDYLHLNPDNFAIQLEKGGKFTVRGKPTLEDLEQFSEKFYCSCYSTLSCKEKADVKDTDAVDVCIADGVCIDAFLKPPMETEEPQIFY

SEQ ID NO: 277 - protein, 447 aa, Artificial Sequence
  Mature PH20 36-482 with K at a position corresponding to amino acid residue 278
LNFRAPPVIPNVPFLWAWNAPSEFCLGKFDEPLDMSLFSFIGSPRINATGQGVTIFYVDRLGYYPYIDSITGVTVNGGIPQKISLQDHLDKAKKDITFYMPVDNLGMAVIDWEEWRPTWARNWKPKDVYKNRSIELVQQQNVQLSLTEATEKAKQEFEKAGKDFLVETIKLGKLLRPNHLWGYYLFPDCYNHHYKKPGYNGSCFNVEIKRNDDLSWLWNESTALYPSIYLNTQQSPVAATLYVRNRVREAIRVSKIPDAKSPLPVFAYTRIVFTDQVKKFLSQDELVYTFGETVALGASGIVIWGTLSIMRSMKSCLLLDNYMETILNPYIINVTLAAKMCSQVLCQEQGVCIRKNWNSSDYLHLNPDNFAIQLEKGGKFTVRGKPTLEDLEQFSEKFYCSCYSTLSCKEKADVKDTDAVDVCIADGVCIDAFLKPPMETEEPQIFY

SEQ ID NO: 278 - protein, 447 aa, Artificial Sequence
  Mature PH20 36-482 with Y at a position corresponding to amino acid residue 69
LNFRAPPVIPNVPFLWAWNAPSEFCLGKFDEPLDMSLFSFIGSPRINATGQGVTIFYVDRLGYYPYIDYITGVTVNGGIPQKISLQDHLDKAKKDITFYMPVDNLGMAVIDWEEWRPTWARNWKPKDVYKNRSIELVQQQNVQLSLTEATEKAKQEFEKAGKDFLVETIKLGKLLRPNHLWGYYLFPDCYNHHYKKPGYNGSCFNVEIKRNDDLSWLWNESTALYPSIYLNTQQSPVAATLYVRNRVREAIRVSKIPDAKSPLPVFAYTRIVFTDQVLKFLSQDELVYTFGETVALGASGIVIWGTLSIMRSMKSCLLLDNYMETILNPYIINVTLAAKMCSQVLCQEQGVCIRKNWNSSDYLHLNPDNFAIQLEKGGKFTVRGKPTLEDLEQFSEKFYCSCYSTLSCKEKADVKDTDAVDVCIADGVCIDAFLKPPMETEEPQIFY

SEQ ID NO: 279 - protein, 447 aa, Artificial Sequence
  Mature PH20 36-482 with G at a position corresponding to amino acid residue 282
LNFRAPPVIPNVPFLWAWNAPSEFCLGKFDEPLDMSLFSFIGSPRINATGQGVTIFYVDRLGYYPYIDSITGVTVNGGIPQKISLQDHLDKAKKDITFYMPVDNLGMAVIDWEEWRPTWARNWKPKDVYKNRSIELVQQQNVQLSLTEATEKAKQEFEKAGKDFLVETIKLGKLLRPNHLWGYYLFPDCYNHHYKKPGYNGSCFNVEIKRNDDLSWLWNESTALYPSIYLNTQQSPVAATLYVRNRVREAIRVSKIPDAKSPLPVFAYTRIVFTDQVLKFLGQDELVYTFGETVALGASGIVIWGTLSIMRSMKSCLLLDNYMETILNPYIINVTLAAKMCSQVLCQEQGVCIRKNWNSSDYLHLNPDNFAIQLEKGGKFTVRGKPTLEDLEQFSEKFYCSCYSTLSCKEKADVKDTDAVDVCIADGVCIDAFLKPPMETEEPQIFY

SEQ ID NO: 280 - protein, 447 aa, Artificial Sequence
  Mature PH20 36-482 with G at a position corresponding to amino acid residue 114
LNFRAPPVIPNVPFLWAWNAPSEFCLGKFDEPLDMSLFSFIGSPRINATGQGVTIFYVDRLGYYPYIDSITGVTVNGGIPQKISLQDHLDKAKKDITFYMPVDNLGMAVIDWEGWRPTWARNWKPKDVYKNRSIELVQQQNVQLSLTEATEKAKQEFEKAGKDFLVETIKLGKLLRPNHLWGYYLFPDCYNHHYKKPGYNGSCFNVEIKRNDDLSWLWNESTALYPSIYLNTQQSPVAATLYVRNRVREAIRVSKIPDAKSPLPVFAYTRIVFTDQVLKFLSQDELVYTFGETVALGASGIVIWGTLSIMRSMKSCLLLDNYMETILNPYIINVTLAAKMCSQVLCQEQGVCIRKNWNSSDYLHLNPDNFAIQLEKGGKFTVRGKPTLEDLEQFSEKFYCSCYSTLSCKEKADVKDTDAVDVCIADGVCIDAFLKPPMETEEPQIFY

SEQ ID NO: 281 - protein, 447 aa, Artificial Sequence
  Mature PH20 36-482 with M at a position corresponding to amino acid residue 118
LNFRAPPVIPNVPFLWAWNAPSEFCLGKFDEPLDMSLFSFIGSPRINATGQGVTIFYVDRLGYYPYIDSITGVTVNGGIPQKISLQDHLDKAKKDITFYMPVDNLGMAVIDWEEWRPMWARNWKPKDVYKNRSIELVQQQNVQLSLTEATEKAKQEFEKAGKDFLVETIKLGKLLRPNHLWGYYLFPDCYNHHYKKPGYNGSCFNVEIKRNDDLSWLWNESTALYPSIYLNTQQSPVAATLYVRNRVREAIRVSKIPDAKSPLPVFAYTRIVFTDQVLKFLSQDELVYTFGETVALGASGIVIWGTLSIMRSMKSCLLLDNYMETILNPYIINVTLAAKMCSQVLCQEQGVCIRKNWNSSDYLHLNPDNFAIQLEKGGKFTVRGKPTLEDLEQFSEKFYCSCYSTLSCKEKADVKDTDAVDVCIADGVCIDAFLKPPMETEEPQIFY

SEQ ID NO: 282 - protein, 447 aa, Artificial Sequence
  Mature PH20 36-482 with H at a position corresponding to amino acid residue 368
LNFRAPPVIPNVPFLWAWNAPSEFCLGKFDEPLDMSLFSFIGSPRINATGQGVTIFYVDRLGYYPYIDSITGVTVNGGIPQKISLQDHLDKAKKDITFYMPVDNLGMAVIDWEEWRPTWARNWKPKDVYKNRSIELVQQQNVQLSLTEATEKAKQEFEKAGKDFLVETIKLGKLLRPNHLWGYYLFPDCYNHHYKKPGYNGSCFNVEIKRNDDLSWLWNESTALYPSIYLNTQQSPVAATLYVRNRVREAIRVSKIPDAKSPLPVFAYTRIVFTDQVLKFLSQDELVYTFGETVALGASGIVIWGTLSIMRSMKSCLLLDNYMETILNPYIINVTLAAKMCSQVLCQEQGVCIRKNWNSSDYLHLNPHNFAIQLEKGGKFTVRGKPTLEDLEQFSEKFYCSCYSTLSCKEKADVKDTDAVDVCIADGVCIDAFLKPPMETEEPQIFY

SEQ ID NO: 283 - protein, 447 aa, Artificial Sequence
  Mature PH20 36-482 with K at a position corresponding to amino acid residue 368
LNFRAPPVIPNVPFLWAWNAPSEFCLGKFDEPLDMSLFSFIGSPRINATGQGVTIFYVDRLGYYPYIDSITGVTVNGGIPQKISLQDHLDKAKKDITFYMPVDNLGMAVIDWEEWRPTWARNWKPKDVYKNRSIELVQQQNVQLSLTEATEKAKQEFEKAGKDFLVETIKLGKLLRPNHLWGYYLFPDCYNHHYKKPGYNGSCFNVEIKRNDDLSWLWNESTALYPSIYLNTQQSPVAATLYVRNRVREAIRVSKIPDAKSPLPVFAYTRIVFTDQVLKFLSQDELVYTFGETVALGASGIVIWGTLSIMRSMKSCLLLDNYMETILNPYIINVTLAAKMCSQVLCQEQGVCIRKNWNSSDYLHLNPKNFAIQLEKGGKFTVRGKPTLEDLEQFSEKFYCSCYSTLSCKEKADVKDTDAVDVCIADGVCIDAFLKPPMETEEPQIFY

SEQ ID NO: 284 - protein, 447 aa, Artificial Sequence
  Mature PH20 36-482 with S at a position corresponding to amino acid residue 163
LNFRAPPVIPNVPFLWAWNAPSEFCLGKFDEPLDMSLFSFIGSPRINATGQGVTIFYVDRLGYYPYIDSITGVTVNGGIPQKISLQDHLDKAKKDITFYMPVDNLGMAVIDWEEWRPTWARNWKPKDVYKNRSIELVQQQNVQLSLTEATEKAKQEFEKAGKSFLVETIKLGKLLRPNHLWGYYLFPDCYNHHYKKPGYNGSCFNVEIKRNDDLSWLWNESTALYPSIYLNTQQSPVAATLYVRNRVREAIRVSKIPDAKSPLPVFAYTRIVFTDQVLKFLSQDELVYTFGETVALGASGIVIWGTLSIMRSMKSCLLLDNYMETILNPYIINVTLAAKMCSQVLCQEQGVCIRKNWNSSDYLHLNPDNFAIQLEKGGKFTVRGKPTLEDLEQFSEKFYCSCYSTLSCKEKADVKDTDAVDVCIADGVCIDAFLKPPMETEEPQIFY

SEQ ID NO: 285 - protein, 447 aa, Artificial Sequence
  Mature PH20 36-482 with Y at a position corresponding to amino acid residue 285
LNFRAPPVIPNVPFLWAWNAPSEFCLGKFDEPLDMSLFSFIGSPRINATGQGVTIFYVDRLGYYPYIDSITGVTVNGGIPQKISLQDHLDKAKKDITFYMPVDNLGMAVIDWEEWRPTWARNWKPKDVYKNRSIELVQQQNVQLSLTEATEKAKQEFEKAGKDFLVETIKLGKLLRPNHLWGYYLFPDCYNHHYKKPGYNGSCFNVEIKRNDDLSWLWNESTALYPSIYLNTQQSPVAATLYVRNRVREAIRVSKIPDAKSPLPVFAYTRIVFTDQVLKFLSQDYLVYTFGETVALGASGIVIWGTLSIMRSMKSCLLLDNYMETILNPYIINVTLAAKMCSQVLCQEQGVCIRKNWNSSDYLHLNPDNFAIQLEKGGKFTVRGKPTLEDLEQFSEKFYCSCYSTLSCKEKADVKDTDAVDVCIADGVCIDAFLKPPMETEEPQIFY

SEQ ID NO: 286 - protein, 447 aa, Artificial Sequence
  Mature PH20 36-482 with M at a position corresponding to amino acid residue 290
LNFRAPPVIPNVPFLWAWNAPSEFCLGKFDEPLDMSLFSFIGSPRINATGQGVTIFYVDRLGYYPYIDSITGVTVNGGIPQKISLQDHLDKAKKDITFYMPVDNLGMAVIDWEEWRPTWARNWKPKDVYKNRSIELVQQQNVQLSLTEATEKAKQEFEKAGKDFLVETIKLGKLLRPNHLWGYYLFPDCYNHHYKKPGYNGSCFNVEIKRNDDLSWLWNESTALYPSIYLNTQQSPVAATLYVRNRVREAIRVSKIPDAKSPLPVFAYTRIVFTDQVLKFLSQDELVYTMGETVALGASGIVIWGTLSIMRSMKSCLLLDNYMETILNPYIINVTLAAKMCSQVLCQEQGVCIRKNWNSSDYLHLNPDNFAIQLEKGGKFTVRGKPTLEDLEQFSEKFYCSCYSTLSCKEKADVKDTDAVDVCIADGVCIDAFLKPPMETEEPQIFY

SEQ ID NO: 287 - protein, 447 aa, Artificial Sequence
  Mature PH20 36-482 with E at a position corresponding to amino acid residue 213
LNFRAPPVIPNVPFLWAWNAPSEFCLGKFDEPLDMSLFSFIGSPRINATGQGVTIFYVDRLGYYPYIDSITGVTVNGGIPQKISLQDHLDKAKKDITFYMPVDNLGMAVIDWEEWRPTWARNWKPKDVYKNRSIELVQQQNVQLSLTEATEKAKQEFEKAGKDFLVETIKLGKLLRPNHLWGYYLFPDCYNHHYKKPGYNGSCFNVEIKRNDELSWLWNESTALYPSIYLNTQQSPVAATLYVRNRVREAIRVSKIPDAKSPLPVFAYTRIVFTDQVLKFLSQDELVYTFGETVALGASGIVIWGTLSIMRSMKSCLLLDNYMETILNPYIINVTLAAKMCSQVLCQEQGVCIRKNWNSSDYLHLNPDNFAIQLEKGGKFTVRGKPTLEDLEQFSEKFYCSCYSTLSCKEKADVKDTDAVDVCIADGVCIDAFLKPPMETEEPQIFY

SEQ ID NO: 288 - protein, 447 aa, Artificial Sequence
  Mature PH20 36-482 with D at a position corresponding to amino acid residue 305
LNFRAPPVIPNVPFLWAWNAPSEFCLGKFDEPLDMSLFSFIGSPRINATGQGVTIFYVDRLGYYPYIDSITGVTVNGGIPQKISLQDHLDKAKKDITFYMPVDNLGMAVIDWEEWRPTWARNWKPKDVYKNRSIELVQQQNVQLSLTEATEKAKQEFEKAGKDFLVETIKLGKLLRPNHLWGYYLFPDCYNHHYKKPGYNGSCFNVEIKRNDDLSWLWNESTALYPSIYLNTQQSPVAATLYVRNRVREAIRVSKIPDAKSPLPVFAYTRIVFTDQVLKFLSQDELVYTFGETVALGASGIVIWDTLSIMRSMKSCLLLDNYMETILNPYIINVTLAAKMCSQVLCQEQGVCIRKNWNSSDYLHLNPDNFAIQLEKGGKFTVRGKPTLEDLEQFSEKFYCSCYSTLSCKEKADVKDTDAVDVCIADGVCIDAFLKPPMETEEPQIFY

SEQ ID NO: 289 - protein, 447 aa, Artificial Sequence
  Mature PH20 36-482 with D at a position corresponding to amino acid residue 446
LNFRAPPVIPNVPFLWAWNAPSEFCLGKFDEPLDMSLFSFIGSPRINATGQGVTIFYVDRLGYYPYIDSITGVTVNGGIPQKISLQDHLDKAKKDITFYMPVDNLGMAVIDWEEWRPTWARNWKPKDVYKNRSIELVQQQNVQLSLTEATEKAKQEFEKAGKDFLVETIKLGKLLRPNHLWGYYLFPDCYNHHYKKPGYNGSCFNVEIKRNDDLSWLWNESTALYPSIYLNTQQSPVAATLYVRNRVREAIRVSKIPDAKSPLPVFAYTRIVFTDQVLKFLSQDELVYTFGETVALGASGIVIWGTLSIMRSMKSCLLLDNYMETILNPYIINVTLAAKMCSQVLCQEQGVCIRKNWNSSDYLHLNPDNFAIQLEKGGKFTVRGKPTLEDLEQFSEKFYCSCYSTLSCKEKADVKDTDAVDVCIADGVCIDAFLKPPMETEEPQIDY

SEQ ID NO: 290 - protein, 447 aa, Artificial Sequence
  Mature PH20 36-482 with E at a position corresponding to amino acid residue 27
LNFRAPPVIPNVPFLWAWNAPSEFCLEKFDEPLDMSLFSFIGSPRINATGQGVTIFYVDRLGYYPYIDSITGVTVNGGIPQKISLQDHLDKAKKDITFYMPVDNLGMAVIDWEEWRPTWARNWKPKDVYKNRSIELVQQQNVQLSLTEATEKAKQEFEKAGKDFLVETIKLGKLLRPNHLWGYYLFPDCYNHHYKKPGYNGSCFNVEIKRNDDLSWLWNESTALYPSIYLNTQQSPVAATLYVRNRVREAIRVSKIPDAKSPLPVFAYTRIVFTDQVLKFLSQDELVYTFGETVALGASGIVIWGTLSIMRSMKSCLLLDNYMETILNPYIINVTLAAKMCSQVLCQEQGVCIRKNWNSSDYLHLNPDNFAIQLEKGGKFTVRGKPTLEDLEQFSEKFYCSCYSTLSCKEKADVKDTDAVDVCIADGVCIDAFLKPPMETEEPQIFY

SEQ ID NO: 291 - protein, 447 aa, Artificial Sequence
  Mature PH20 36-482 with E at a position corresponding to amino acid residue 309
LNFRAPPVIPNVPFLWAWNAPSEFCLGKFDEPLDMSLFSFIGSPRINATGQGVTIFYVDRLGYYPYIDSITGVTVNGGIPQKISLQDHLDKAKKDITFYMPVDNLGMAVIDWEEWRPTWARNWKPKDVYKNRSIELVQQQNVQLSLTEATEKAKQEFEKAGKDFLVETIKLGKLLRPNHLWGYYLFPDCYNHHYKKPGYNGSCFNVEIKRNDDLSWLWNESTALYPSIYLNTQQSPVAATLYVRNRVREAIRVSKIPDAKSPLPVFAYTRIVFTDQVLKFLSQDELVYTFGETVALGASGIVIWGTLSEMRSMKSCLLLDNYMETILNPYIINVTLAAKMCSQVLCQEQGVCIRKNWNSSDYLHLNPDNFAIQLEKGGKFTVRGKPTLEDLEQFSEKFYCSCYSTLSCKEKADVKDTDAVDVCIADGVCIDAFLKPPMETEEPQIFY

SEQ ID NO: 292 - protein, 447 aa, Artificial Sequence
  Mature PH20 36-482 with H at a position corresponding to amino acid residue 309
LNFRAPPVIPNVPFLWAWNAPSEFCLGKFDEPLDMSLFSFIGSPRINATGQGVTIFYVDRLGYYPYIDSITGVTVNGGIPQKISLQDHLDKAKKDITFYMPVDNLGMAVIDWEEWRPTWARNWKPKDVYKNRSIELVQQQNVQLSLTEATEKAKQEFEKAGKDFLVETIKLGKLLRPNHLWGYYLFPDCYNHHYKKPGYNGSCFNVEIKRNDDLSWLWNESTALYPSIYLNTQQSPVAATLYVRNRVREAIRVSKIPDAKSPLPVFAYTRIVFTDQVLKFLSQDELVYTFGETVALGASGIVIWGTLSHMRSMKSCLLLDNYMETILNPYIINVTLAAKMCSQVLCQEQGVCIRKNWNSSDYLHLNPDNFAIQLEKGGKFTVRGKPTLEDLEQFSEKFYCSCYSTLSCKEKADVKDTDAVDVCIADGVCIDAFLKPPMETEEPQIFY

SEQ ID NO: 293 - protein, 447 aa, Artificial Sequence
  Mature PH20 36-482 with L at a position corresponding to amino acid residue 309
LNFRAPPVIPNVPFLWAWNAPSEFCLGKFDEPLDMSLFSFIGSPRINATGQGVTIFYVDRLGYYPYIDSITGVTVNGGIPQKISLQDHLDKAKKDITFYMPVDNLGMAVIDWEEWRPTWARNWKPKDVYKNRSIELVQQQNVQLSLTEATEKAKQEFEKAGKDFLVETIKLGKLLRPNHLWGYYLFPDCYNHHYKKPGYNGSCFNVEIKRNDDLSWLWNESTALYPSIYLNTQQSPVAATLYVRNRVREAIRVSKIPDAKSPLPVFAYTRIVFTDQVLKFLSQDELVYTFGETVALGASGIVIWGTLSLMRSMKSCLLLDNYMETILNPYIINVTLAAKMCSQVLCQEQGVCIRKNWNSSDYLHLNPDNFAIQLEKGGKFTVRGKPTLEDLEQFSEKFYCSCYSTLSCKEKADVKDTDAVDVCIADGVCIDAFLKPPMETEEPQIFY

SEQ ID NO: 294 - protein, 447 aa, Artificial Sequence
  Mature PH20 36-482 with Q at a position corresponding to amino acid residue 310
LNFRAPPVIPNVPFLWAWNAPSEFCLGKFDEPLDMSLFSFIGSPRINATGQGVTIFYVDRLGYYPYIDSITGVTVNGGIPQKISLQDHLDKAKKDITFYMPVDNLGMAVIDWEEWRPTWARNWKPKDVYKNRSIELVQQQNVQLSLTEATEKAKQEFEKAGKDFLVETIKLGKLLRPNHLWGYYLFPDCYNHHYKKPGYNGSCFNVEIKRNDDLSWLWNESTALYPSIYLNTQQSPVAATLYVRNRVREAIRVSKIPDAKSPLPVFAYTRIVFTDQVLKFLSQDELVYTFGETVALGASGIVIWGTLSIQRSMKSCLLLDNYMETILNPYIINVTLAAKMCSQVLCQEQGVCIRKNWNSSDYLHLNPDNFAIQLEKGGKFTVRGKPTLEDLEQFSEKFYCSCYSTLSCKEKADVKDTDAVDVCIADGVCIDAFLKPPMETEEPQIFY

SEQ ID NO: 295 - protein, 447 aa, Artificial Sequence
  Mature PH20 36-482 with M at a position corresponding to amino acid residue 98
LNFRAPPVIPNVPFLWAWNAPSEFCLGKFDEPLDMSLFSFIGSPRINATGQGVTIFYVDRLGYYPYIDSITGVTVNGGIPQKISLQDHLDKAKKDITMYMPVDNLGMAVIDWEEWRPTWARNWKPKDVYKNRSIELVQQQNVQLSLTEATEKAKQEFEKAGKDFLVETIKLGKLLRPNHLWGYYLFPDCYNHHYKKPGYNGSCFNVEIKRNDDLSWLWNESTALYPSIYLNTQQSPVAATLYVRNRVREAIRVSKIPDAKSPLPVFAYTRIVFTDQVLKFLSQDELVYTFGETVALGASGIVIWGTLSIMRSMKSCLLLDNYMETILNPYIINVTLAAKMCSQVLCQEQGVCIRKNWNSSDYLHLNPDNFAIQLEKGGKFTVRGKPTLEDLEQFSEKFYCSCYSTLSCKEKADVKDTDAVDVCIADGVCIDAFLKPPMETEEPQIFY

SEQ ID NO: 296 - protein, 447 aa, Artificial Sequence
  Mature PH20 36-482 with G at a position corresponding to amino acid residue 412
LNFRAPPVIPNVPFLWAWNAPSEFCLGKFDEPLDMSLFSFIGSPRINATGQGVTIFYVDRLGYYPYIDSITGVTVNGGIPQKISLQDHLDKAKKDITFYMPVDNLGMAVIDWEEWRPTWARNWKPKDVYKNRSIELVQQQNVQLSLTEATEKAKQEFEKAGKDFLVETIKLGKLLRPNHLWGYYLFPDCYNHHYKKPGYNGSCFNVEIKRNDDLSWLWNESTALYPSIYLNTQQSPVAATLYVRNRVREAIRVSKIPDAKSPLPVFAYTRIVFTDQVLKFLSQDELVYTFGETVALGASGIVIWGTLSIMRSMKSCLLLDNYMETILNPYIINVTLAAKMCSQVLCQEQGVCIRKNWNSSDYLHLNPDNFAIQLEKGGKFTVRGKPTLEDLEQFSEKFYCSCYSTLSCKEKGDVKDTDAVDVCIADGVCIDAFLKPPMETEEPQIFY

SEQ ID NO: 297 - protein, 447 aa, Artificial Sequence
  Mature PH20 36-482 with S at a position corresponding to amino acid residue 120
LNFRAPPVIPNVPFLWAWNAPSEFCLGKFDEPLDMSLFSFIGSPRINATGQGVTIFYVDRLGYYPYIDSITGVTVNGGIPQKISLQDHLDKAKKDITFYMPVDNLGMAVIDWEEWRPTWSRNWKPKDVYKNRSIELVQQQNVQLSLTEATEKAKQEFEKAGKDFLVETIKLGKLLRPNHLWGYYLFPDCYNHHYKKPGYNGSCFNVEIKRNDDLSWLWNESTALYPSIYLNTQQSPVAATLYVRNRVREAIRVSKIPDAKSPLPVFAYTRIVFTDQVLKFLSQDELVYTFGETVALGASGIVIWGTLSIMRSMKSCLLLDNYMETILNPYIINVTLAAKMCSQVLCQEQGVCIRKNWNSSDYLHLNPDNFAIQLEKGGKFTVRGKPTLEDLEQFSEKFYCSCYSTLSCKEKADVKDTDAVDVCIADGVCIDAFLKPPMETEEPQIFY

SEQ ID NO: 298 - protein, 447 aa, Artificial Sequence
  Mature PH20 36-482 with K at a position corresponding to amino acid residue 311
LNFRAPPVIPNVPFLWAWNAPSEFCLGKFDEPLDMSLFSFIGSPRINATGQGVTIFYVDRLGYYPYIDSITGVTVNGGIPQKISLQDHLDKAKKDITFYMPVDNLGMAVIDWEEWRPTWARNWKPKDVYKNRSIELVQQQNVQLSLTEATEKAKQEFEKAGKDFLVETIKLGKLLRPNHLWGYYLFPDCYNHHYKKPGYNGSCFNVEIKRNDDLSWLWNESTALYPSIYLNTQQSPVAATLYVRNRVREAIRVSKIPDAKSPLPVFAYTRIVFTDQVLKFLSQDELVYTFGETVALGASGIVIWGTLSIMKSMKSCLLLDNYMETILNPYIINVTLAAKMCSQVLCQEQGVCIRKNWNSSDYLHLNPDNFAIQLEKGGKFTVRGKPTLEDLEQFSEKFYCSCYSTLSCKEKADVKDTDAVDVCIADGVCIDAFLKPPMETEEPQIFY

SEQ ID NO: 299 - protein, 447 aa, Artificial Sequence
  Mature PH20 36-482 with A at a position corresponding to amino acid residue 132
LNFRAPPVIPNVPFLWAWNAPSEFCLGKFDEPLDMSLFSFIGSPRINATGQGVTIFYVDRLGYYPYIDSITGVTVNGGIPQKISLQDHLDKAKKDITFYMPVDNLGMAVIDWEEWRPTWARNWKPKDVYKNASIELVQQQNVQLSLTEATEKAKQEFEKAGKDFLVETIKLGKLLRPNHLWGYYLFPDCYNHHYKKPGYNGSCFNVEIKRNDDLSWLWNESTALYPSIYLNTQQSPVAATLYVRNRVREAIRVSKIPDAKSPLPVFAYTRIVFTDQVLKFLSQDELVYTFGETVALGASGIVIWGTLSIMRSMKSCLLLDNYMETILNPYIINVTLAAKMCSQVLCQEQGVCIRKNWNSSDYLHLNPDNFAIQLEKGGKFTVRGKPTLEDLEQFSEKFYCSCYSTLSCKEKADVKDTDAVDVCIADGVCIDAFLKPPMETEEPQIFY

SEQ ID NO: 300 - protein, 447 aa, Artificial Sequence
  Mature PH20 36-482 with T at a position corresponding to amino acid residue 39
LNFRAPPVIPNVPFLWAWNAPSEFCLGKFDEPLDMSLFTFIGSPRINATGQGVTIFYVDRLGYYPYIDSITGVTVNGGIPQKISLQDHLDKAKKDITFYMPVDNLGMAVIDWEEWRPTWARNWKPKDVYKNRSIELVQQQNVQLSLTEATEKAKQEFEKAGKDFLVETIKLGKLLRPNHLWGYYLFPDCYNHHYKKPGYNGSCFNVEIKRNDDLSWLWNESTALYPSIYLNTQQSPVAATLYVRNRVREAIRVSKIPDAKSPLPVFAYTRIVFTDQVLKFLSQDELVYTFGETVALGASGIVIWGTLSIMRSMKSCLLLDNYMETILNPYIINVTLAAKMCSQVLCQEQGVCIRKNWNSSDYLHLNPDNFAIQLEKGGKFTVRGKPTLEDLEQFSEKFYCSCYSTLSCKEKADVKDTDAVDVCIADGVCIDAFLKPPMETEEPQIFY

SEQ ID NO: 301 - protein, 447 aa, Artificial Sequence
  Mature PH20 36-482 with K at a position corresponding to amino acid residue 318
LNFRAPPVIPNVPFLWAWNAPSEFCLGKFDEPLDMSLFSFIGSPRINATGQGVTIFYVDRLGYYPYIDSITGVTVNGGIPQKISLQDHLDKAKKDITFYMPVDNLGMAVIDWEEWRPTWARNWKPKDVYKNRSIELVQQQNVQLSLTEATEKAKQEFEKAGKDFLVETIKLGKLLRPNHLWGYYLFPDCYNHHYKKPGYNGSCFNVEIKRNDDLSWLWNESTALYPSIYLNTQQSPVAATLYVRNRVREAIRVSKIPDAKSPLPVFAYTRIVFTDQVLKFLSQDELVYTFGETVALGASGIVIWGTLSIMRSMKSCLKLDNYMETILNPYIINVTLAAKMCSQVLCQEQGVCIRKNWNSSDYLHLNPDNFAIQLEKGGKFTVRGKPTLEDLEQFSEKFYCSCYSTLSCKEKADVKDTDAVDVCIADGVCIDAFLKPPMETEEPQIFY

SEQ ID NO: 302 - protein, 447 aa, Artificial Sequence
  Mature PH20 36-482 with M at a position corresponding to amino acid residue 318
LNFRAPPVIPNVPFLWAWNAPSEFCLGKFDEPLDMSLFSFIGSPRINATGQGVTIFYVDRLGYYPYIDSITGVTVNGGIPQKISLQDHLDKAKKDITFYMPVDNLGMAVIDWEEWRPTWARNWKPKDVYKNRSIELVQQQNVQLSLTEATEKAKQEFEKAGKDFLVETIKLGKLLRPNHLWGYYLFPDCYNHHYKKPGYNGSCFNVEIKRNDDLSWLWNESTALYPSIYLNTQQSPVAATLYVRNRVREAIRVSKIPDAKSPLPVFAYTRIVFTDQVLKFLSQDELVYTFGETVALGASGIVIWGTLSIMRSMKSCLMLDNYMETILNPYIINVTLAAKMCSQVLCQEQGVCIRKNWNSSDYLHLNPDNFAIQLEKGGKFTVRGKPTLEDLEQFSEKFYCSCYSTLSCKEKADVKDTDAVDVCIADGVCIDAFLKPPMETEEPQIFY

SEQ ID NO: 303 - protein, 447 aa, Artificial Sequence
  Mature PH20 36-482 with N at a position corresponding to amino acid residue 318
LNFRAPPVIPNVPFLWAWNAPSEFCLGKFDEPLDMSLFSFIGSPRINATGQGVTIFYVDRLGYYPYIDSITGVTVNGGIPQKISLQDHLDKAKKDITFYMPVDNLGMAVIDWEEWRPTWARNWKPKDVYKNRSIELVQQQNVQLSLTEATEKAKQEFEKAGKDFLVETIKLGKLLRPNHLWGYYLFPDCYNHHYKKPGYNGSCFNVEIKRNDDLSWLWNESTALYPSIYLNTQQSPVAATLYVRNRVREAIRVSKIPDAKSPLPVFAYTRIVFTDQVLKFLSQDELVYTFGETVALGASGIVIWGTLSIMRSMKSCLNLDNYMETILNPYIINVTLAAKMCSQVLCQEQGVCIRKNWNSSDYLHLNPDNFAIQLEKGGKFTVRGKPTLEDLEQFSEKFYCSCYSTLSCKEKADVKDTDAVDVCIADGVCIDAFLKPPMETEEPQIFY

SEQ ID NO: 304 - protein, 447 aa, Artificial Sequence
  Mature PH20 36-482 with Q at a position corresponding to amino acid residue 318
LNFRAPPVIPNVPFLWAWNAPSEFCLGKFDEPLDMSLFSFIGSPRINATGQGVTIFYVDRLGYYPYIDSITGVTVNGGIPQKISLQDHLDKAKKDITFYMPVDNLGMAVIDWEEWRPTWARNWKPKDVYKNRSIELVQQQNVQLSLTEATEKAKQEFEKAGKDFLVETIKLGKLLRPNHLWGYYLFPDCYNHHYKKPGYNGSCFNVEIKRNDDLSWLWNESTALYPSIYLNTQQSPVAATLYVRNRVREAIRVSKIPDAKSPLPVFAYTRIVFTDQVLKFLSQDELVYTFGETVALGASGIVIWGTLSIMRSMKSCLQLDNYMETILNPYIINVTLAAKMCSQVLCQEQGVCIRKNWNSSDYLHLNPDNFAIQLEKGGKFTVRGKPTLEDLEQFSEKFYCSCYSTLSCKEKADVKDTDAVDVCIADGVCIDAFLKPPMETEEPQIFY

SEQ ID NO: 305 - protein, 447 aa, Artificial Sequence
  Mature PH20 36-482 with R at a position corresponding to amino acid residue 320
LNFRAPPVIPNVPFLWAWNAPSEFCLGKFDEPLDMSLFSFIGSPRINATGQGVTIFYVDRLGYYPYIDSITGVTVNGGIPQKISLQDHLDKAKKDITFYMPVDNLGMAVIDWEEWRPTWARNWKPKDVYKNRSIELVQQQNVQLSLTEATEKAKQEFEKAGKDFLVETIKLGKLLRPNHLWGYYLFPDCYNHHYKKPGYNGSCFNVEIKRNDDLSWLWNESTALYPSIYLNTQQSPVAATLYVRNRVREAIRVSKIPDAKSPLPVFAYTRIVFTDQVLKFLSQDELVYTFGETVALGASGIVIWGTLSIMRSMKSCLLLRNYMETILNPYIINVTLAAKMCSQVLCQEQGVCIRKNWNSSDYLHLNPDNFAIQLEKGGKFTVRGKPTLEDLEQFSEKFYCSCYSTLSCKEKADVKDTDAVDVCIADGVCIDAFLKPPMETEEPQIFY

SEQ ID NO: 306 - protein, 447 aa, Artificial Sequence
  Mature PH20 36-482 with V at a position corresponding to amino acid residue 146
LNFRAPPVIPNVPFLWAWNAPSEFCLGKFDEPLDMSLFSFIGSPRINATGQGVTIFYVDRLGYYPYIDSITGVTVNGGIPQKISLQDHLDKAKKDITFYMPVDNLGMAVIDWEEWRPTWARNWKPKDVYKNRSIELVQQQNVQLSVTEATEKAKQEFEKAGKDFLVETIKLGKLLRPNHLWGYYLFPDCYNHHYKKPGYNGSCFNVEIKRNDDLSWLWNESTALYPSIYLNTQQSPVAATLYVRNRVREAIRVSKIPDAKSPLPVFAYTRIVFTDQVLKFLSQDELVYTFGETVALGASGIVIWGTLSIMRSMKSCLLLDNYMETILNPYIINVTLAAKMCSQVLCQEQGVCIRKNWNSSDYLHLNPDNFAIQLEKGGKFTVRGKPTLEDLEQFSEKFYCSCYSTLSCKEKADVKDTDAVDVCIADGVCIDAFLKPPMETEEPQIFY

SEQ ID NO: 307 - protein, 447 aa, Artificial Sequence
  Mature PH20 36-482 with H at a position corresponding to amino acid residue 321
LNFRAPPVIPNVPFLWAWNAPSEFCLGKFDEPLDMSLFSFIGSPRINATGQGVTIFYVDRLGYYPYIDSITGVTVNGGIPQKISLQDHLDKAKKDITFYMPVDNLGMAVIDWEEWRPTWARNWKPKDVYKNRSIELVQQQNVQLSLTEATEKAKQEFEKAGKDFLVETIKLGKLLRPNHLWGYYLFPDCYNHHYKKPGYNGSCFNVEIKRNDDLSWLWNESTALYPSIYLNTQQSPVAATLYVRNRVREAIRVSKIPDAKSPLPVFAYTRIVFTDQVLKFLSQDELVYTFGETVALGASGIVIWGTLSIMRSMKSCLLLDHYMETILNPYIINVTLAAKMCSQVLCQEQGVCIRKNWNSSDYLHLNPDNFAIQLEKGGKFTVRGKPTLEDLEQFSEKFYCSCYSTLSCKEKADVKDTDAVDVCIADGVCIDAFLKPPMETEEPQIFY

SEQ ID NO: 308 - protein, 447 aa, Artificial Sequence
  Mature PH20 36-482 with M at a position corresponding to amino acid residue 147
LNFRAPPVIPNVPFLWAWNAPSEFCLGKFDEPLDMSLFSFIGSPRINATGQGVTIFYVDRLGYYPYIDSITGVTVNGGIPQKISLQDHLDKAKKDITFYMPVDNLGMAVIDWEEWRPTWARNWKPKDVYKNRSIELVQQQNVQLSLMEATEKAKQEFEKAGKDFLVETIKLGKLLRPNHLWGYYLFPDCYNHHYKKPGYNGSCFNVEIKRNDDLSWLWNESTALYPSIYLNTQQSPVAATLYVRNRVREAIRVSKIPDAKSPLPVFAYTRIVFTDQVLKFLSQDELVYTFGETVALGASGIVIWGTLSIMRSMKSCLLLDNYMETILNPYIINVTLAAKMCSQVLCQEQGVCIRKNWNSSDYLHLNPDNFAIQLEKGGKFTVRGKPTLEDLEQFSEKFYCSCYSTLSCKEKADVKDTDAVDVCIADGVCIDAFLKPPMETEEPQIFY

SEQ ID NO: 309 - protein, 447 aa, Artificial Sequence
  Mature PH20 36-482 with C at a position corresponding to amino acid residue 148
LNFRAPPVIPNVPFLWAWNAPSEFCLGKFDEPLDMSLFSFIGSPRINATGQGVTIFYVDRLGYYPYIDSITGVTVNGGIPQKISLQDHLDKAKKDITFYMPVDNLGMAVIDWEEWRPTWARNWKPKDVYKNRSIELVQQQNVQLSLTCATEKAKQEFEKAGKDFLVETIKLGKLLRPNHLWGYYLFPDCYNHHYKKPGYNGSCFNVEIKRNDDLSWLWNESTALYPSIYLNTQQSPVAATLYVRNRVREAIRVSKIPDAKSPLPVFAYTRIVFTDQVLKFLSQDELVYTFGETVALGASGIVIWGTLSIMRSMKSCLLLDNYMETILNPYIINVTLAAKMCSQVLCQEQGVCIRKNWNSSDYLHLNPDNFAIQLEKGGKFTVRGKPTLEDLEQFSEKFYCSCYSTLSCKEKADVKDTDAVDVCIADGVCIDAFLKPPMETEEPQIFY

SEQ ID NO: 310 - protein, 447 aa, Artificial Sequence
  Mature PH20 36-482 with H at a position corresponding to amino acid residue 148
LNFRAPPVIPNVPFLWAWNAPSEFCLGKFDEPLDMSLFSFIGSPRINATGQGVTIFYVDRLGYYPYIDSITGVTVNGGIPQKISLQDHLDKAKKDITFYMPVDNLGMAVIDWEEWRPTWARNWKPKDVYKNRSIELVQQQNVQLSLTHATEKAKQEFEKAGKDFLVETIKLGKLLRPNHLWGYYLFPDCYNHHYKKPGYNGSCFNVEIKRNDDLSWLWNESTALYPSIYLNTQQSPVAATLYVRNRVREAIRVSKIPDAKSPLPVFAYTRIVFTDQVLKFLSQDELVYTFGETVALGASGIVIWGTLSIMRSMKSCLLLDNYMETILNPYIINVTLAAKMCSQVLCQEQGVCIRKNWNSSDYLHLNPDNFAIQLEKGGKFTVRGKPTLEDLEQFSEKFYCSCYSTLSCKEKADVKDTDAVDVCIADGVCIDAFLKPPMETEEPQIFY

SEQ ID NO: 311 - protein, 447 aa, Artificial Sequence
  Mature PH20 36-482 with K at a position corresponding to amino acid residue 148
LNFRAPPVIPNVPFLWAWNAPSEFCLGKFDEPLDMSLFSFIGSPRINATGQGVTIFYVDRLGYYPYIDSITGVTVNGGIPQKISLQDHLDKAKKDITFYMPVDNLGMAVIDWEEWRPTWARNWKPKDVYKNRSIELVQQQNVQLSLTKATEKAKQEFEKAGKDFLVETIKLGKLLRPNHLWGYYLFPDCYNHHYKKPGYNGSCFNVEIKRNDDLSWLWNESTALYPSIYLNTQQSPVAATLYVRNRVREAIRVSKIPDAKSPLPVFAYTRIVFTDQVLKFLSQDELVYTFGETVALGASGIVIWGTLSIMRSMKSCLLLDNYMETILNPYIINVTLAAKMCSQVLCQEQGVCIRKNWNSSDYLHLNPDNFAIQLEKGGKFTVRGKPTLEDLEQFSEKFYCSCYSTLSCKEKADVKDTDAVDVCIADGVCIDAFLKPPMETEEPQIFY

SEQ ID NO: 312 - protein, 447 aa, Artificial Sequence
  Mature PH20 36-482 with V at a position corresponding to amino acid residue 343
LNFRAPPVIPNVPFLWAWNAPSEFCLGKFDEPLDMSLFSFIGSPRINATGQGVTIFYVDRLGYYPYIDSITGVTVNGGIPQKISLQDHLDKAKKDITFYMPVDNLGMAVIDWEEWRPTWARNWKPKDVYKNRSIELVQQQNVQLSLTEATEKAKQEFEKAGKDFLVETIKLGKLLRPNHLWGYYLFPDCYNHHYKKPGYNGSCFNVEIKRNDDLSWLWNESTALYPSIYLNTQQSPVAATLYVRNRVREAIRVSKIPDAKSPLPVFAYTRIVFTDQVLKFLSQDELVYTFGETVALGASGIVIWGTLSIMRSMKSCLLLDNYMETILNPYIINVTLAAKMCSVVLCQEQGVCIRKNWNSSDYLHLNPDNFAIQLEKGGKFTVRGKPTLEDLEQFSEKFYCSCYSTLSCKEKADVKDTDAVDVCIADGVCIDAFLKPPMETEEPQIFY

SEQ ID NO: 313 - protein, 447 aa, Artificial Sequence
  Mature PH20 36-482 with A at a position corresponding to amino acid residue 349
LNFRAPPVIPNVPFLWAWNAPSEFCLGKFDEPLDMSLFSFIGSPRINATGQGVTIFYVDRLGYYPYIDSITGVTVNGGIPQKISLQDHLDKAKKDITFYMPVDNLGMAVIDWEEWRPTWARNWKPKDVYKNRSIELVQQQNVQLSLTEATEKAKQEFEKAGKDFLVETIKLGKLLRPNHLWGYYLFPDCYNHHYKKPGYNGSCFNVEIKRNDDLSWLWNESTALYPSIYLNTQQSPVAATLYVRNRVREAIRVSKIPDAKSPLPVFAYTRIVFTDQVLKFLSQDELVYTFGETVALGASGIVIWGTLSIMRSMKSCLLLDNYMETILNPYIINVTLAAKMCSQVLCQEAGVCIRKNWNSSDYLHLNPDNFAIQLEKGGKFTVRGKPTLEDLEQFSEKFYCSCYSTLSCKEKADVKDTDAVDVCIADGVCIDAFLKPPMETEEPQIFY

SEQ ID NO: 314 - protein, 447 aa, Artificial Sequence
  Mature PH20 36-482 with E at a position corresponding to amino acid residue 349
LNFRAPPVIPNVPFLWAWNAPSEFCLGKFDEPLDMSLFSFIGSPRINATGQGVTIFYVDRLGYYPYIDSITGVTVNGGIPQKISLQDHLDKAKKDITFYMPVDNLGMAVIDWEEWRPTWARNWKPKDVYKNRSIELVQQQNVQLSLTEATEKAKQEFEKAGKDFLVETIKLGKLLRPNHLWGYYLFPDCYNHHYKKPGYNGSCFNVEIKRNDDLSWLWNESTALYPSIYLNTQQSPVAATLYVRNRVREAIRVSKIPDAKSPLPVFAYTRIVFTDQVLKFLSQDELVYTFGETVALGASGIVIWGTLSIMRSMKSCLLLDNYMETILNPYIINVTLAAKMCSQVLCQEEGVCIRKNWNSSDYLHLNPDNFAIQLEKGGKFTVRGKPTLEDLEQFSEKFYCSCYSTLSCKEKADVKDTDAVDVCIADGVCIDAFLKPPMETEEPQIFY

SEQ ID NO: 315 - protein, 447 aa, Artificial Sequence
  Mature PH20 36-482 with E at a position corresponding to amino acid residue 359
LNFRAPPVIPNVPFLWAWNAPSEFCLGKFDEPLDMSLFSFIGSPRINATGQGVTIFYVDRLGYYPYIDSITGVTVNGGIPQKISLQDHLDKAKKDITFYMPVDNLGMAVIDWEEWRPTWARNWKPKDVYKNRSIELVQQQNVQLSLTEATEKAKQEFEKAGKDFLVETIKLGKLLRPNHLWGYYLFPDCYNHHYKKPGYNGSCFNVEIKRNDDLSWLWNESTALYPSIYLNTQQSPVAATLYVRNRVREAIRVSKIPDAKSPLPVFAYTRIVFTDQVLKFLSQDELVYTFGETVALGASGIVIWGTLSIMRSMKSCLLLDNYMETILNPYIINVTLAAKMCSQVLCQEQGVCIRKNWNESDYLHLNPDNFAIQLEKGGKFTVRGKPTLEDLEQFSEKFYCSCYSTLSCKEKADVKDTDAVDVCIADGVCIDAFLKPPMETEEPQIFY

SEQ ID NO: 316 - protein, 447 aa, Artificial Sequence
  Mature PH20 36-482 with H at a position corresponding to amino acid residue 102
LNFRAPPVIPNVPFLWAWNAPSEFCLGKFDEPLDMSLFSFIGSPRINATGQGVTIFYVDRLGYYPYIDSITGVTVNGGIPQKISLQDHLDKAKKDITFYMPHDNLGMAVIDWEEWRPTWARNWKPKDVYKNRSIELVQQQNVQLSLTEATEKAKQEFEKAGKDFLVETIKLGKLLRPNHLWGYYLFPDCYNHHYKKPGYNGSCFNVEIKRNDDLSWLWNESTALYPSIYLNTQQSPVAATLYVRNRVREAIRVSKIPDAKSPLPVFAYTRIVFTDQVLKFLSQDELVYTFGETVALGASGIVIWGTLSIMRSMKSCLLLDNYMETILNPYIINVTLAAKMCSQVLCQEQGVCIRKNWNSSDYLHLNPDNFAIQLEKGGKFTVRGKPTLEDLEQFSEKFYCSCYSTLSCKEKADVKDTDAVDVCIADGVCIDAFLKPPMETEEPQIFY

SEQ ID NO: 317 - protein, 447 aa, Artificial Sequence
  Mature PH20 36-482 with N at a position corresponding to amino acid residue 406
LNFRAPPVIPNVPFLWAWNAPSEFCLGKFDEPLDMSLFSFIGSPRINATGQGVTIFYVDRLGYYPYIDSITGVTVNGGIPQKISLQDHLDKAKKDITFYMPVDNLGMAVIDWEEWRPTWARNWKPKDVYKNRSIELVQQQNVQLSLTEATEKAKQEFEKAGKDFLVETIKLGKLLRPNHLWGYYLFPDCYNHHYKKPGYNGSCFNVEIKRNDDLSWLWNESTALYPSIYLNTQQSPVAATLYVRNRVREAIRVSKIPDAKSPLPVFAYTRIVFTDQVLKFLSQDELVYTFGETVALGASGIVIWGTLSIMRSMKSCLLLDNYMETILNPYIINVTLAAKMCSQVLCQEQGVCIRKNWNSSDYLHLNPDNFAIQLEKGGKFTVRGKPTLEDLEQFSEKFYCSCYSTNSCKEKADVKDTDAVDVCIADGVCIDAFLKPPMETEEPQIFY

SEQ ID NO: 318 - protein, 447 aa, Artificial Sequence
  Mature PH20 36-482 with F at a position corresponding to amino acid residue 407
LNFRAPPVIPNVPFLWAWNAPSEFCLGKFDEPLDMSLFSFIGSPRINATGQGVTIFYVDRLGYYPYIDSITGVTVNGGIPQKISLQDHLDKAKKDITFYMPVDNLGMAVIDWEEWRPTWARNWKPKDVYKNRSIELVQQQNVQLSLTEATEKAKQEFEKAGKDFLVETIKLGKLLRPNHLWGYYLFPDCYNHHYKKPGYNGSCFNVEIKRNDDLSWLWNESTALYPSIYLNTQQSPVAATLYVRNRVREAIRVSKIPDAKSPLPVFAYTRIVFTDQVLKFLSQDELVYTFGETVALGASGIVIWGTLSIMRSMKSCLLLDNYMETILNPYIINVTLAAKMCSQVLCQEQGVCIRKNWNSSDYLHLNPDNFAIQLEKGGKFTVRGKPTLEDLEQFSEKFYCSCYSTLFCKEKADVKDTDAVDVCIADGVCIDAFLKPPMETEEPQIFY

SEQ ID NO: 319 - protein, 447 aa, Artificial Sequence
  Mature PH20 36-482 with E at a position corresponding to amino acid residue 371
LNFRAPPVIPNVPFLWAWNAPSEFCLGKFDEPLDMSLFSFIGSPRINATGQGVTIFYVDRLGYYPYIDSITGVTVNGGIPQKISLQDHLDKAKKDITFYMPVDNLGMAVIDWEEWRPTWARNWKPKDVYKNRSIELVQQQNVQLSLTEATEKAKQEFEKAGKDFLVETIKLGKLLRPNHLWGYYLFPDCYNHHYKKPGYNGSCFNVEIKRNDDLSWLWNESTALYPSIYLNTQQSPVAATLYVRNRVREAIRVSKIPDAKSPLPVFAYTRIVFTDQVLKFLSQDELVYTFGETVALGASGIVIWGTLSIMRSMKSCLLLDNYMETILNPYIINVTLAAKMCSQVLCQEQGVCIRKNWNSSDYLHLNPDNFEIQLEKGGKFTVRGKPTLEDLEQFSEKFYCSCYSTLSCKEKADVKDTDAVDVCIADGVCIDAFLKPPMETEEPQIFY

SEQ ID NO: 320 - protein, 447 aa, Artificial Sequence
  Mature PH20 36-482 with K at a position corresponding to amino acid residue 37
LNFRAPPVIPNVPFLWAWNAPSEFCLGKFDEPLDMSKFSFIGSPRINATGQGVTIFYVDRLGYYPYIDSITGVTVNGGIPQKISLQDHLDKAKKDITFYMPVDNLGMAVIDWEEWRPTWARNWKPKDVYKNRSIELVQQQNVQLSLTEATEKAKQEFEKAGKDFLVETIKLGKLLRPNHLWGYYLFPDCYNHHYKKPGYNGSCFNVEIKRNDDLSWLWNESTALYPSIYLNTQQSPVAATLYVRNRVREAIRVSKIPDAKSPLPVFAYTRIVFTDQVLKFLSQDELVYTFGETVALGASGIVIWGTLSIMRSMKSCLLLDNYMETILNPYIINVTLAAKMCSQVLCQEQGVCIRKNWNSSDYLHLNPDNFAIQLEKGGKFTVRGKPTLEDLEQFSEKFYCSCYSTLSCKEKADVKDTDAVDVCIADGVCIDAFLKPPMETEEPQIFY

SEQ ID NO: 321 - protein, 447 aa, Artificial Sequence
  Mature PH20 36-482 with M at a position corresponding to amino acid residue 371
LNFRAPPVIPNVPFLWAWNAPSEFCLGKFDEPLDMSLFSFIGSPRINATGQGVTIFYVDRLGYYPYIDSITGVTVNGGIPQKISLQDHLDKAKKDITFYMPVDNLGMAVIDWEEWRPTWARNWKPKDVYKNRSIELVQQQNVQLSLTEATEKAKQEFEKAGKDFLVETIKLGKLLRPNHLWGYYLFPDCYNHHYKKPGYNGSCFNVEIKRNDDLSWLWNESTALYPSIYLNTQQSPVAATLYVRNRVREAIRVSKIPDAKSPLPVFAYTRIVFTDQVLKFLSQDELVYTFGETVALGASGIVIWGTLSIMRSMKSCLLLDNYMETILNPYIINVTLAAKMCSQVLCQEQGVCIRKNWNSSDYLHLNPDNFMIQLEKGGKFTVRGKPTLEDLEQFSEKFYCSCYSTLSCKEKADVKDTDAVDVCIADGVCIDAFLKPPMETEEPQIFY

SEQ ID NO: 322 - protein, 447 aa, Artificial Sequence
  Mature PH20 36-482 with T at a position corresponding to amino acid residue 371
LNFRAPPVIPNVPFLWAWNAPSEFCLGKFDEPLDMSLFSFIGSPRINATGQGVTIFYVDRLGYYPYIDSITGVTVNGGIPQKISLQDHLDKAKKDITFYMPVDNLGMAVIDWEEWRPTWARNWKPKDVYKNRSIELVQQQNVQLSLTEATEKAKQEFEKAGKDFLVETIKLGKLLRPNHLWGYYLFPDCYNHHYKKPGYNGSCFNVEIKRNDDLSWLWNESTALYPSIYLNTQQSPVAATLYVRNRVREAIRVSKIPDAKSPLPVFAYTRIVFTDQVLKFLSQDELVYTFGETVALGASGIVIWGTLSIMRSMKSCLLLDNYMETILNPYIINVTLAAKMCSQVLCQEQGVCIRKNWNSSDYLHLNPDNFTIQLEKGGKFTVRGKPTLEDLEQFSEKFYCSCYSTLSCKEKADVKDTDAVDVCIADGVCIDAFLKPPMETEEPQIFY

SEQ ID NO: 323 - protein, 447 aa, Artificial Sequence
  Mature PH20 36-482 with A at a position corresponding to amino acid residue 161
LNFRAPPVIPNVPFLWAWNAPSEFCLGKFDEPLDMSLFSFIGSPRINATGQGVTIFYVDRLGYYPYIDSITGVTVNGGIPQKISLQDHLDKAKKDITFYMPVDNLGMAVIDWEEWRPTWARNWKPKDVYKNRSIELVQQQNVQLSLTEATEKAKQEFEKAAKDFLVETIKLGKLLRPNHLWGYYLFPDCYNHHYKKPGYNGSCFNVEIKRNDDLSWLWNESTALYPSIYLNTQQSPVAATLYVRNRVREAIRVSKIPDAKSPLPVFAYTRIVFTDQVLKFLSQDELVYTFGETVALGASGIVIWGTLSIMRSMKSCLLLDNYMETILNPYIINVTLAAKMCSQVLCQEQGVCIRKNWNSSDYLHLNPDNFAIQLEKGGKFTVRGKPTLEDLEQFSEKFYCSCYSTLSCKEKADVKDTDAVDVCIADGVCIDAFLKPPMETEEPQIFY

SEQ ID NO: 324 - protein, 447 aa, Artificial Sequence
  Mature PH20 36-482 with A at a position corresponding to amino acid residue 374
LNFRAPPVIPNVPFLWAWNAPSEFCLGKFDEPLDMSLFSFIGSPRINATGQGVTIFYVDRLGYYPYIDSITGVTVNGGIPQKISLQDHLDKAKKDITFYMPVDNLGMAVIDWEEWRPTWARNWKPKDVYKNRSIELVQQQNVQLSLTEATEKAKQEFEKAGKDFLVETIKLGKLLRPNHLWGYYLFPDCYNHHYKKPGYNGSCFNVEIKRNDDLSWLWNESTALYPSIYLNTQQSPVAATLYVRNRVREAIRVSKIPDAKSPLPVFAYTRIVFTDQVLKFLSQDELVYTFGETVALGASGIVIWGTLSIMRSMKSCLLLDNYMETILNPYIINVTLAAKMCSQVLCQEQGVCIRKNWNSSDYLHLNPDNFAIQAEKGGKFTVRGKPTLEDLEQFSEKFYCSCYSTLSCKEKADVKDTDAVDVCIADGVCIDAFLKPPMETEEPQIFY

SEQ ID NO: 325 - protein, 447 aa, Artificial Sequence
  Mature PH20 36-482 with V at a position corresponding to amino acid residue 374
LNFRAPPVIPNVPFLWAWNAPSEFCLGKFDEPLDMSLFSFIGSPRINATGQGVTIFYVDRLGYYPYIDSITGVTVNGGIPQKISLQDHLDKAKKDITFYMPVDNLGMAVIDWEEWRPTWARNWKPKDVYKNRSIELVQQQNVQLSLTEATEKAKQEFEKAGKDFLVETIKLGKLLRPNHLWGYYLFPDCYNHHYKKPGYNGSCFNVEIKRNDDLSWLWNESTALYPSIYLNTQQSPVAATLYVRNRVREAIRVSKIPDAKSPLPVFAYTRIVFTDQVLKFLSQDELVYTFGETVALGASGIVIWGTLSIMRSMKSCLLLDNYMETILNPYIINVTLAAKMCSQVLCQEQGVCIRKNWNSSDYLHLNPDNFAIQVEKGGKFTVRGKPTLEDLEQFSEKFYCSCYSTLSCKEKADVKDTDAVDVCIADGVCIDAFLKPPMETEEPQIFY

SEQ ID NO: 326 - protein, 447 aa, Artificial Sequence
  Mature PH20 36-482 with T at a position corresponding to amino acid residue 375
LNFRAPPVIPNVPFLWAWNAPSEFCLGKFDEPLDMSLFSFIGSPRINATGQGVTIFYVDRLGYYPYIDSITGVTVNGGIPQKISLQDHLDKAKKDITFYMPVDNLGMAVIDWEEWRPTWARNWKPKDVYKNRSIELVQQQNVQLSLTEATEKAKQEFEKAGKDFLVETIKLGKLLRPNHLWGYYLFPDCYNHHYKKPGYNGSCFNVEIKRNDDLSWLWNESTALYPSIYLNTQQSPVAATLYVRNRVREAIRVSKIPDAKSPLPVFAYTRIVFTDQVLKFLSQDELVYTFGETVALGASGIVIWGTLSIMRSMKSCLLLDNYMETILNPYIINVTLAAKMCSQVLCQEQGVCIRKNWNSSDYLHLNPDNFAIQLTKGGKFTVRGKPTLEDLEQFSEKFYCSCYSTLSCKEKADVKDTDAVDVCIADGVCIDAFLKPPMETEEPQIFY

SEQ ID NO: 327 - protein, 447 aa, Artificial Sequence
  Mature PH20 36-482 with Y at a position corresponding to amino acid residue 376
LNFRAPPVIPNVPFLWAWNAPSEFCLGKFDEPLDMSLFSFIGSPRINATGQGVTIFYVDRLGYYPYIDSITGVTVNGGIPQKISLQDHLDKAKKDITFYMPVDNLGMAVIDWEEWRPTWARNWKPKDVYKNRSIELVQQQNVQLSLTEATEKAKQEFEKAGKDFLVETIKLGKLLRPNHLWGYYLFPDCYNHHYKKPGYNGSCFNVEIKRNDDLSWLWNESTALYPSIYLNTQQSPVAATLYVRNRVREAIRVSKIPDAKSPLPVFAYTRIVFTDQVLKFLSQDELVYTFGETVALGASGIVIWGTLSIMRSMKSCLLLDNYMETILNPYIINVTLAAKMCSQVLCQEQGVCIRKNWNSSDYLHLNPDNFAIQLEYGGKFTVRGKPTLEDLEQFSEKFYCSCYSTLSCKEKADVKDTDAVDVCIADGVCIDAFLKPPMETEEPQIFY

SEQ ID NO: 328 - protein, 447 aa, Artificial Sequence
  Mature PH20 36-482 with C at a position corresponding to amino acid residue 439
LNFRAPPVIPNVPFLWAWNAPSEFCLGKFDEPLDMSLFSFIGSPRINATGQGVTIFYVDRLGYYPYIDSITGVTVNGGIPQKISLQDHLDKAKKDITFYMPVDNLGMAVIDWEEWRPTWARNWKPKDVYKNRSIELVQQQNVQLSLTEATEKAKQEFEKAGKDFLVETIKLGKLLRPNHLWGYYLFPDCYNHHYKKPGYNGSCFNVEIKRNDDLSWLWNESTALYPSIYLNTQQSPVAATLYVRNRVREAIRVSKIPDAKSPLPVFAYTRIVFTDQVLKFLSQDELVYTFGETVALGASGIVIWGTLSIMRSMKSCLLLDNYMETILNPYIINVTLAAKMCSQVLCQEQGVCIRKNWNSSDYLHLNPDNFAIQLEKGGKFTVRGKPTLEDLEQFSEKFYCSCYSTLSCKEKADVKDTDAVDVCIADGVCIDAFLKPPMCTEEPQIFY

SEQ ID NO: 329 - protein, 447 aa, Artificial Sequence
  Mature PH20 36-482 with A at a position corresponding to amino acid residue 30
LNFRAPPVIPNVPFLWAWNAPSEFCLGKFAEPLDMSLFSFIGSPRINATGQGVTIFYVDRLGYYPYIDSITGVTVNGGIPQKISLQDHLDKAKKDITFYMPVDNLGMAVIDWEEWRPTWARNWKPKDVYKNRSIELVQQQNVQLSLTEATEKAKQEFEKAGKDFLVETIKLGKLLRPNHLWGYYLFPDCYNHHYKKPGYNGSCFNVEIKRNDDLSWLWNESTALYPSIYLNTQQSPVAATLYVRNRVREAIRVSKIPDAKSPLPVFAYTRIVFTDQVLKFLSQDELVYTFGETVALGASGIVIWGTLSIMRSMKSCLLLDNYMETILNPYIINVTLAAKMCSQVLCQEQGVCIRKNWNSSDYLHLNPDNFAIQLEKGGKFTVRGKPTLEDLEQFSEKFYCSCYSTLSCKEKADVKDTDAVDVCIADGVCIDAFLKPPMETEEPQIFY

SEQ ID NO: 330 - protein, 447 aa, Artificial Sequence
  Mature PH20 36-482 with E at a position corresponding to amino acid residue 205
LNFRAPPVIPNVPFLWAWNAPSEFCLGKFDEPLDMSLFSFIGSPRINATGQGVTIFYVDRLGYYPYIDSITGVTVNGGIPQKISLQDHLDKAKKDITFYMPVDNLGMAVIDWEEWRPTWARNWKPKDVYKNRSIELVQQQNVQLSLTEATEKAKQEFEKAGKDFLVETIKLGKLLRPNHLWGYYLFPDCYNHHYKKPGYNGSCFEVEIKRNDDLSWLWNESTALYPSIYLNTQQSPVAATLYVRNRVREAIRVSKIPDAKSPLPVFAYTRIVFTDQVLKFLSQDELVYTFGETVALGASGIVIWGTLSIMRSMKSCLLLDNYMETILNPYIINVTLAAKMCSQVLCQEQGVCIRKNWNSSDYLHLNPDNFAIQLEKGGKFTVRGKPTLEDLEQFSEKFYCSCYSTLSCKEKADVKDTDAVDVCIADGVCIDAFLKPPMETEEPQIFY

SEQ ID NO: 331 - protein, 447 aa, Artificial Sequence
  Mature PH20 36-482 with L at a position corresponding to amino acid residue 433
LNFRAPPVIPNVPFLWAWNAPSEFCLGKFDEPLDMSLFSFIGSPRINATGQGVTIFYVDRLGYYPYIDSITGVTVNGGIPQKISLQDHLDKAKKDITFYMPVDNLGMAVIDWEEWRPTWARNWKPKDVYKNRSIELVQQQNVQLSLTEATEKAKQEFEKAGKDFLVETIKLGKLLRPNHLWGYYLFPDCYNHHYKKPGYNGSCFNVEIKRNDDLSWLWNESTALYPSIYLNTQQSPVAATLYVRNRVREAIRVSKIPDAKSPLPVFAYTRIVFTDQVLKFLSQDELVYTFGETVALGASGIVIWGTLSIMRSMKSCLLLDNYMETILNPYIINVTLAAKMCSQVLCQEQGVCIRKNWNSSDYLHLNPDNFAIQLEKGGKFTVRGKPTLEDLEQFSEKFYCSCYSTLSCKEKADVKDTDAVDVCIADGVCIDALLKPPMETEEPQIFY

SEQ ID NO: 332 - protein, 447 aa, Artificial Sequence
  Mature PH20 36-482 with T at a position corresponding to amino acid residue 433
LNFRAPPVIPNVPFLWAWNAPSEFCLGKFDEPLDMSLFSFIGSPRINATGQGVTIFYVDRLGYYPYIDSITGVTVNGGIPQKISLQDHLDKAKKDITFYMPVDNLGMAVIDWEEWRPTWARNWKPKDVYKNRSIELVQQQNVQLSLTEATEKAKQEFEKAGKDFLVETIKLGKLLRPNHLWGYYLFPDCYNHHYKKPGYNGSCFNVEIKRNDDLSWLWNESTALYPSIYLNTQQSPVAATLYVRNRVREAIRVSKIPDAKSPLPVFAYTRIVFTDQVLKFLSQDELVYTFGETVALGASGIVIWGTLSIMRSMKSCLLLDNYMETILNPYIINVTLAAKMCSQVLCQEQGVCIRKNWNSSDYLHLNPDNFAIQLEKGGKFTVRGKPTLEDLEQFSEKFYCSCYSTLSCKEKADVKDTDAVDVCIADGVCIDATLKPPMETEEPQIFY

SEQ ID NO: 333 - protein, 447 aa, Artificial Sequence
  Mature PH20 36-482 with W at a position corresponding to amino acid residue 138
LNFRAPPVIPNVPFLWAWNAPSEFCLGKFDEPLDMSLFSFIGSPRINATGQGVTIFYVDRLGYYPYIDSITGVTVNGGIPQKISLQDHLDKAKKDITFYMPVDNLGMAVIDWEEWRPTWARNWKPKDVYKNRSIELVWQQNVQLSLTEATEKAKQEFEKAGKDFLVETIKLGKLLRPNHLWGYYLFPDCYNHHYKKPGYNGSCFNVEIKRNDDLSWLWNESTALYPSIYLNTQQSPVAATLYVRNRVREAIRVSKIPDAKSPLPVFAYTRIVFTDQVLKFLSQDELVYTFGETVALGASGIVIWGTLSIMRSMKSCLLLDNYMETILNPYIINVTLAAKMCSQVLCQEQGVCIRKNWNSSDYLHLNPDNFAIQLEKGGKFTVRGKPTLEDLEQFSEKFYCSCYSTLSCKEKADVKDTDAVDVCIADGVCIDAFLKPPMETEEPQIFY

SEQ ID NO: 334 - protein, 447 aa, Artificial Sequence
  Mature PH20 36-482 with S at a position corresponding to amino acid residue 26
LNFRAPPVIPNVPFLWAWNAPSEFCSGKFDEPLDMSLFSFIGSPRINATGQGVTIFYVDRLGYYPYIDSITGVTVNGGIPQKISLQDHLDKAKKDITFYMPVDNLGMAVIDWEEWRPTWARNWKPKDVYKNRSIELVQQQNVQLSLTEATEKAKQEFEKAGKDFLVETIKLGKLLRPNHLWGYYLFPDCYNHHYKKPGYNGSCFNVEIKRNDDLSWLWNESTALYPSIYLNTQQSPVAATLYVRNRVREAIRVSKIPDAKSPLPVFAYTRIVFTDQVLKFLSQDELVYTFGETVALGASGIVIWGTLSIMRSMKSCLLLDNYMETILNPYIINVTLAAKMCSQVLCQEQGVCIRKNWNSSDYLHLNPDNFAIQLEKGGKFTVRGKPTLEDLEQFSEKFYCSCYSTLSCKEKADVKDTDAVDVCIADGVCIDAFLKPPMETEEPQIFY

SEQ ID NO: 335 - protein, 447 aa, Artificial Sequence
  Mature PH20 36-482 with N at a position corresponding to amino acid residue 94
LNFRAPPVIPNVPFLWAWNAPSEFCLGKFDEPLDMSLFSFIGSPRINATGQGVTIFYVDRLGYYPYIDSITGVTVNGGIPQKISLQDHLDKAKNDITFYMPVDNLGMAVIDWEEWRPTWARNWKPKDVYKNRSIELVQQQNVQLSLTEATEKAKQEFEKAGKDFLVETIKLGKLLRPNHLWGYYLFPDCYNHHYKKPGYNGSCFNVEIKRNDDLSWLWNESTALYPSIYLNTQQSPVAATLYVRNRVREAIRVSKIPDAKSPLPVFAYTRIVFTDQVLKFLSQDELVYTFGETVALGASGIVIWGTLSIMRSMKSCLLLDNYMETILNPYIINVTLAAKMCSQVLCQEQGVCIRKNWNSSDYLHLNPDNFAIQLEKGGKFTVRGKPTLEDLEQFSEKFYCSCYSTLSCKEKADVKDTDAVDVCIADGVCIDAFLKPPMETEEPQIFY

SEQ ID NO: 336 - protein, 447 aa, Artificial Sequence
  Mature PH20 36-482 with V at a position corresponding to amino acid residue 380
LNFRAPPVIPNVPFLWAWNAPSEFCLGKFDEPLDMSLFSFIGSPRINATGQGVTIFYVDRLGYYPYIDSITGVTVNGGIPQKISLQDHLDKAKKDITFYMPVDNLGMAVIDWEEWRPTWARNWKPKDVYKNRSIELVQQQNVQLSLTEATEKAKQEFEKAGKDFLVETIKLGKLLRPNHLWGYYLFPDCYNHHYKKPGYNGSCFNVEIKRNDDLSWLWNESTALYPSIYLNTQQSPVAATLYVRNRVREAIRVSKIPDAKSPLPVFAYTRIVFTDQVLKFLSQDELVYTFGETVALGASGIVIWGTLSIMRSMKSCLLLDNYMETILNPYIINVTLAAKMCSQVLCQEQGVCIRKNWNSSDYLHLNPDNFAIQLEKGGKVTVRGKPTLEDLEQFSEKFYCSCYSTLSCKEKADVKDTDAVDVCIADGVCIDAFLKPPMETEEPQIFY

SEQ ID NO: 337 - protein, 447 aa, Artificial Sequence
  Mature PH20 36-482 with W at a position corresponding to amino acid residue 32
LNFRAPPVIPNVPFLWAWNAPSEFCLGKFDEWLDMSLFSFIGSPRINATGQGVTIFYVDRLGYYPYIDSITGVTVNGGIPQKISLQDHLDKAKKDITFYMPVDNLGMAVIDWEEWRPTWARNWKPKDVYKNRSIELVQQQNVQLSLTEATEKAKQEFEKAGKDFLVETIKLGKLLRPNHLWGYYLFPDCYNHHYKKPGYNGSCFNVEIKRNDDLSWLWNESTALYPSIYLNTQQSPVAATLYVRNRVREAIRVSKIPDAKSPLPVFAYTRIVFTDQVLKFLSQDELVYTFGETVALGASGIVIWGTLSIMRSMKSCLLLDNYMETILNPYIINVTLAAKMCSQVLCQEQGVCIRKNWNSSDYLHLNPDNFAIQLEKGGKFTVRGKPTLEDLEQFSEKFYCSCYSTLSCKEKADVKDTDAVDVCIADGVCIDAFLKPPMETEEPQIFY

SEQ ID NO: 338 - protein, 447 aa, Artificial Sequence
  Mature PH20 36-482 with K at a position corresponding to amino acid residue 389
LNFRAPPVIPNVPFLWAWNAPSEFCLGKFDEPLDMSLFSFIGSPRINATGQGVTIFYVDRLGYYPYIDSITGVTVNGGIPQKISLQDHLDKAKKDITFYMPVDNLGMAVIDWEEWRPTWARNWKPKDVYKNRSIELVQQQNVQLSLTEATEKAKQEFEKAGKDFLVETIKLGKLLRPNHLWGYYLFPDCYNHHYKKPGYNGSCFNVEIKRNDDLSWLWNESTALYPSIYLNTQQSPVAATLYVRNRVREAIRVSKIPDAKSPLPVFAYTRIVFTDQVLKFLSQDELVYTFGETVALGASGIVIWGTLSIMRSMKSCLLLDNYMETILNPYIINVTLAAKMCSQVLCQEQGVCIRKNWNSSDYLHLNPDNFAIQLEKGGKFTVRGKPTLKDLEQFSEKFYCSCYSTLSCKEKADVKDTDAVDVCIADGVCIDAFLKPPMETEEPQIFY

SEQ ID NO: 339 - protein, 447 aa, Artificial Sequence
  Mature PH20 36-482 with L at a position corresponding to amino acid residue 393
LNFRAPPVIPNVPFLWAWNAPSEFCLGKFDEPLDMSLFSFIGSPRINATGQGVTIFYVDRLGYYPYIDSITGVTVNGGIPQKISLQDHLDKAKKDITFYMPVDNLGMAVIDWEEWRPTWARNWKPKDVYKNRSIELVQQQNVQLSLTEATEKAKQEFEKAGKDFLVETIKLGKLLRPNHLWGYYLFPDCYNHHYKKPGYNGSCFNVEIKRNDDLSWLWNESTALYPSIYLNTQQSPVAATLYVRNRVREAIRVSKIPDAKSPLPVFAYTRIVFTDQVLKFLSQDELVYTFGETVALGASGIVIWGTLSIMRSMKSCLLLDNYMETILNPYIINVTLAAKMCSQVLCQEQGVCIRKNWNSSDYLHLNPDNFAIQLEKGGKFTVRGKPTLEDLELFSEKFYCSCYSTLSCKEKADVKDTDAVDVCIADGVCIDAFLKPPMETEEPQIFY

SEQ ID NO: 340 - protein, 447 aa, Artificial Sequence
  Mature PH20 36-482 with R at a position corresponding to amino acid residue 399
LNFRAPPVIPNVPFLWAWNAPSEFCLGKFDEPLDMSLFSFIGSPRINATGQGVTIFYVDRLGYYPYIDSITGVTVNGGIPQKISLQDHLDKAKKDITFYMPVDNLGMAVIDWEEWRPTWARNWKPKDVYKNRSIELVQQQNVQLSLTEATEKAKQEFEKAGKDFLVETIKLGKLLRPNHLWGYYLFPDCYNHHYKKPGYNGSCFNVEIKRNDDLSWLWNESTALYPSIYLNTQQSPVAATLYVRNRVREAIRVSKIPDAKSPLPVFAYTRIVFTDQVLKFLSQDELVYTFGETVALGASGIVIWGTLSIMRSMKSCLLLDNYMETILNPYIINVTLAAKMCSQVLCQEQGVCIRKNWNSSDYLHLNPDNFAIQLEKGGKFTVRGKPTLEDLEQFSEKFRCSCYSTLSCKEKADVKDTDAVDVCIADGVCIDAFLKPPMETEEPQIFY

SEQ ID NO: 341 - protein, 447 aa, Artificial Sequence
  Mature PH20 36-482 with W at a position corresponding to amino acid residue 399
LNFRAPPVIPNVPFLWAWNAPSEFCLGKFDEPLDMSLFSFIGSPRINATGQGVTIFYVDRLGYYPYIDSITGVTVNGGIPQKISLQDHLDKAKKDITFYMPVDNLGMAVIDWEEWRPTWARNWKPKDVYKNRSIELVQQQNVQLSLTEATEKAKQEFEKAGKDFLVETIKLGKLLRPNHLWGYYLFPDCYNHHYKKPGYNGSCFNVEIKRNDDLSWLWNESTALYPSIYLNTQQSPVAATLYVRNRVREAIRVSKIPDAKSPLPVFAYTRIVFTDQVLKFLSQDELVYTFGETVALGASGIVIWGTLSIMRSMKSCLLLDNYMETILNPYIINVTLAAKMCSQVLCQEQGVCIRKNWNSSDYLHLNPDNFAIQLEKGGKFTVRGKPTLEDLEQFSEKFWCSCYSTLSCKEKADVKDTDAVDVCIADGVCIDAFLKPPMETEEPQIFY

SEQ ID NO: 342 - protein, 447 aa, Artificial Sequence
  Mature PH20 36-482 with G at a position corresponding to amino acid residue 401
LNFRAPPVIPNVPFLWAWNAPSEFCLGKFDEPLDMSLFSFIGSPRINATGQGVTIFYVDRLGYYPYIDSITGVTVNGGIPQKISLQDHLDKAKKDITFYMPVDNLGMAVIDWEEWRPTWARNWKPKDVYKNRSIELVQQQNVQLSLTEATEKAKQEFEKAGKDFLVETIKLGKLLRPNHLWGYYLFPDCYNHHYKKPGYNGSCFNVEIKRNDDLSWLWNESTALYPSIYLNTQQSPVAATLYVRNRVREAIRVSKIPDAKSPLPVFAYTRIVFTDQVLKFLSQDELVYTFGETVALGASGIVIWGTLSIMRSMKSCLLLDNYMETILNPYIINVTLAAKMCSQVLCQEQGVCIRKNWNSSDYLHLNPDNFAIQLEKGGKFTVRGKPTLEDLEQFSEKFYCGCYSTLSCKEKADVKDTDAVDVCIADGVCIDAFLKPPMETEEPQIFY

SEQ ID NO: 343 - protein, 447 aa, Artificial Sequence
  Mature PH20 36-482 with F at a position corresponding to amino acid residue 403
LNFRAPPVIPNVPFLWAWNAPSEFCLGKFDEPLDMSLFSFIGSPRINATGQGVTIFYVDRLGYYPYIDSITGVTVNGGIPQKISLQDHLDKAKKDITFYMPVDNLGMAVIDWEEWRPTWARNWKPKDVYKNRSIELVQQQNVQLSLTEATEKAKQEFEKAGKDFLVETIKLGKLLRPNHLWGYYLFPDCYNHHYKKPGYNGSCFNVEIKRNDDLSWLWNESTALYPSIYLNTQQSPVAATLYVRNRVREAIRVSKIPDAKSPLPVFAYTRIVFTDQVLKFLSQDELVYTFGETVALGASGIVIWGTLSIMRSMKSCLLLDNYMETILNPYIINVTLAAKMCSQVLCQEQGVCIRKNWNSSDYLHLNPDNFAIQLEKGGKFTVRGKPTLEDLEQFSEKFYCSCFSTLSCKEKADVKDTDAVDVCIADGVCIDAFLKPPMETEEPQIFY

SEQ ID NO: 344 - protein, 447 aa, Artificial Sequence
  Mature PH20 36-482 with P at a position corresponding to amino acid residue 259
LNFRAPPVIPNVPFLWAWNAPSEFCLGKFDEPLDMSLFSFIGSPRINATGQGVTIFYVDRLGYYPYIDSITGVTVNGGIPQKISLQDHLDKAKKDITFYMPVDNLGMAVIDWEEWRPTWARNWKPKDVYKNRSIELVQQQNVQLSLTEATEKAKQEFEKAGKDFLVETIKLGKLLRPNHLWGYYLFPDCYNHHYKKPGYNGSCFNVEIKRNDDLSWLWNESTALYPSIYLNTQQSPVAATLYVRNRVREAIRVSKIPDPKSPLPVFAYTRIVFTDQVLKFLSQDELVYTFGETVALGASGIVIWGTLSIMRSMKSCLLLDNYMETILNPYIINVTLAAKMCSQVLCQEQGVCIRKNWNSSDYLHLNPDNFAIQLEKGGKFTVRGKPTLEDLEQFSEKFYCSCYSTLSCKEKADVKDTDAVDVCIADGVCIDAFLKPPMETEEPQIFY

SEQ ID NO: 345 - protein, 447 aa, Artificial Sequence
  Mature PH20 36-482 with E at a position corresponding to amino acid residue 86
LNFRAPPVIPNVPFLWAWNAPSEFCLGKFDEPLDMSLFSFIGSPRINATGQGVTIFYVDRLGYYPYIDSITGVTVNGGIPQKISLEDHLDKAKKDITFYMPVDNLGMAVIDWEEWRPTWARNWKPKDVYKNRSIELVQQQNVQLSLTEATEKAKQEFEKAGKDFLVETIKLGKLLRPNHLWGYYLFPDCYNHHYKKPGYNGSCFNVEIKRNDDLSWLWNESTALYPSIYLNTQQSPVAATLYVRNRVREAIRVSKIPDAKSPLPVFAYTRIVFTDQVLKFLSQDELVYTFGETVALGASGIVIWGTLSIMRSMKSCLLLDNYMETILNPYIINVTLAAKMCSQVLCQEQGVCIRKNWNSSDYLHLNPDNFAIQLEKGGKFTVRGKPTLEDLEQFSEKFYCSCYSTLSCKEKADVKDTDAVDVCIADGVCIDAFLKPPMETEEPQIFY

SEQ ID NO: 346 - protein, 447 aa, Artificial Sequence
  Mature PH20 36-482 with H at a position corresponding to amino acid residue 407
LNFRAPPVIPNVPFLWAWNAPSEFCLGKFDEPLDMSLFSFIGSPRINATGQGVTIFYVDRLGYYPYIDSITGVTVNGGIPQKISLQDHLDKAKKDITFYMPVDNLGMAVIDWEEWRPTWARNWKPKDVYKNRSIELVQQQNVQLSLTEATEKAKQEFEKAGKDFLVETIKLGKLLRPNHLWGYYLFPDCYNHHYKKPGYNGSCFNVEIKRNDDLSWLWNESTALYPSIYLNTQQSPVAATLYVRNRVREAIRVSKIPDAKSPLPVFAYTRIVFTDQVLKFLSQDELVYTFGETVALGASGIVIWGTLSIMRSMKSCLLLDNYMETILNPYIINVTLAAKMCSQVLCQEQGVCIRKNWNSSDYLHLNPDNFAIQLEKGGKFTVRGKPTLEDLEQFSEKFYCSCYSTLHCKEKADVKDTDAVDVCIADGVCIDAFLKPPMETEEPQIFY

SEQ ID NO: 347 - protein, 447 aa, Artificial Sequence
  Mature PH20 36-482 with M at a position corresponding to amino acid residue 407
LNFRAPPVIPNVPFLWAWNAPSEFCLGKFDEPLDMSLFSFIGSPRINATGQGVTIFYVDRLGYYPYIDSITGVTVNGGIPQKISLQDHLDKAKKDITFYMPVDNLGMAVIDWEEWRPTWARNWKPKDVYKNRSIELVQQQNVQLSLTEATEKAKQEFEKAGKDFLVETIKLGKLLRPNHLWGYYLFPDCYNHHYKKPGYNGSCFNVEIKRNDDLSWLWNESTALYPSIYLNTQQSPVAATLYVRNRVREAIRVSKIPDAKSPLPVFAYTRIVFTDQVLKFLSQDELVYTFGETVALGASGIVIWGTLSIMRSMKSCLLLDNYMETILNPYIINVTLAAKMCSQVLCQEQGVCIRKNWNSSDYLHLNPDNFAIQLEKGGKFTVRGKPTLEDLEQFSEKFYCSCYSTLMCKEKADVKDTDAVDVCIADGVCIDAFLKPPMETEEPQIFY

SEQ ID NO: 348 - protein, 447 aa, Artificial Sequence
  Mature PH20 36-482 with P at a position corresponding to amino acid residue 407
LNFRAPPVIPNVPFLWAWNAPSEFCLGKFDEPLDMSLFSFIGSPRINATGQGVTIFYVDRLGYYPYIDSITGVTVNGGIPQKISLQDHLDKAKKDITFYMPVDNLGMAVIDWEEWRPTWARNWKPKDVYKNRSIELVQQQNVQLSLTEATEKAKQEFEKAGKDFLVETIKLGKLLRPNHLWGYYLFPDCYNHHYKKPGYNGSCFNVEIKRNDDLSWLWNESTALYPSIYLNTQQSPVAATLYVRNRVREAIRVSKIPDAKSPLPVFAYTRIVFTDQVLKFLSQDELVYTFGETVALGASGIVIWGTLSIMRSMKSCLLLDNYMETILNPYIINVTLAAKMCSQVLCQEQGVCIRKNWNSSDYLHLNPDNFAIQLEKGGKFTVRGKPTLEDLEQFSEKFYCSCYSTLPCKEKADVKDTDAVDVCIADGVCIDAFLKPPMETEEPQIFY

SEQ ID NO: 349 - protein, 447 aa, Artificial Sequence
  Mature PH20 36-482 with K at a position corresponding to amino acid residue 163
LNFRAPPVIPNVPFLWAWNAPSEFCLGKFDEPLDMSLFSFIGSPRINATGQGVTIFYVDRLGYYPYIDSITGVTVNGGIPQKISLQDHLDKAKKDITFYMPVDNLGMAVIDWEEWRPTWARNWKPKDVYKNRSIELVQQQNVQLSLTEATEKAKQEFEKAGKKFLVETIKLGKLLRPNHLWGYYLFPDCYNHHYKKPGYNGSCFNVEIKRNDDLSWLWNESTALYPSIYLNTQQSPVAATLYVRNRVREAIRVSKIPDAKSPLPVFAYTRIVFTDQVLKFLSQDELVYTFGETVALGASGIVIWGTLSIMRSMKSCLLLDNYMETILNPYIINVTLAAKMCSQVLCQEQGVCIRKNWNSSDYLHLNPDNFAIQLEKGGKFTVRGKPTLEDLEQFSEKFYCSCYSTLSCKEKADVKDTDAVDVCIADGVCIDAFLKPPMETEEPQIFY

SEQ ID NO: 350 - protein, 447 aa, Artificial Sequence
  Mature PH20 36-482 with M at a position corresponding to amino acid residue 260
LNFRAPPVIPNVPFLWAWNAPSEFCLGKFDEPLDMSLFSFIGSPRINATGQGVTIFYVDRLGYYPYIDSITGVTVNGGIPQKISLQDHLDKAKKDITFYMPVDNLGMAVIDWEEWRPTWARNWKPKDVYKNRSIELVQQQNVQLSLTEATEKAKQEFEKAGKDFLVETIKLGKLLRPNHLWGYYLFPDCYNHHYKKPGYNGSCFNVEIKRNDDLSWLWNESTALYPSIYLNTQQSPVAATLYVRNRVREAIRVSKIPDAMSPLPVFAYTRIVFTDQVLKFLSQDELVYTFGETVALGASGIVIWGTLSIMRSMKSCLLLDNYMETILNPYIINVTLAAKMCSQVLCQEQGVCIRKNWNSSDYLHLNPDNFAIQLEKGGKFTVRGKPTLEDLEQFSEKFYCSCYSTLSCKEKADVKDTDAVDVCIADGVCIDAFLKPPMETEEPQIFY

SEQ ID NO: 351 - protein, 447 aa, Artificial Sequence
  Mature PH20 36-482 with H at a position corresponding to amino acid residue 388
LNFRAPPVIPNVPFLWAWNAPSEFCLGKFDEPLDMSLFSFIGSPRINATGQGVTIFYVDRLGYYPYIDSITGVTVNGGIPQKISLQDHLDKAKKDITFYMPVDNLGMAVIDWEEWRPTWARNWKPKDVYKNRSIELVQQQNVQLSLTEATEKAKQEFEKAGKDFLVETIKLGKLLRPNHLWGYYLFPDCYNHHYKKPGYNGSCFNVEIKRNDDLSWLWNESTALYPSIYLNTQQSPVAATLYVRNRVREAIRVSKIPDAKSPLPVFAYTRIVFTDQVLKFLSQDELVYTFGETVALGASGIVIWGTLSIMRSMKSCLLLDNYMETILNPYIINVTLAAKMCSQVLCQEQGVCIRKNWNSSDYLHLNPDNFAIQLEKGGKFTVRGKPTHEDLEQFSEKFYCSCYSTLSCKEKADVKDTDAVDVCIADGVCIDAFLKPPMETEEPQIFY

SEQ ID NO: 352 - protein, 447 aa, Artificial Sequence
  Mature PH20 36-482 with C at a position corresponding to amino acid residue 131
LNFRAPPVIPNVPFLWAWNAPSEFCLGKFDEPLDMSLFSFIGSPRINATGQGVTIFYVDRLGYYPYIDSITGVTVNGGIPQKISLQDHLDKAKKDITFYMPVDNLGMAVIDWEEWRPTWARNWKPKDVYKCRSIELVQQQNVQLSLTEATEKAKQEFEKAGKDFLVETIKLGKLLRPNHLWGYYLFPDCYNHHYKKPGYNGSCFNVEIKRNDDLSWLWNESTALYPSIYLNTQQSPVAATLYVRNRVREAIRVSKIPDAKSPLPVFAYTRIVFTDQVLKFLSQDELVYTFGETVALGASGIVIWGTLSIMRSMKSCLLLDNYMETILNPYIINVTLAAKMCSQVLCQEQGVCIRKNWNSSDYLHLNPDNFAIQLEKGGKFTVRGKPTLEDLEQFSEKFYCSCYSTLSCKEKADVKDTDAVDVCIADGVCIDAFLKPPMETEEPQIFY

SEQ ID NO: 353 - protein, 447 aa, Artificial Sequence
  Mature PH20 36-482 with H at a position corresponding to amino acid residue 195
LNFRAPPVIPNVPFLWAWNAPSEFCLGKFDEPLDMSLFSFIGSPRINATGQGVTIFYVDRLGYYPYIDSITGVTVNGGIPQKISLQDHLDKAKKDITFYMPVDNLGMAVIDWEEWRPTWARNWKPKDVYKNRSIELVQQQNVQLSLTEATEKAKQEFEKAGKDFLVETIKLGKLLRPNHLWGYYLFPDCYNHHYHKPGYNGSCFNVEIKRNDDLSWLWNESTALYPSIYLNTQQSPVAATLYVRNRVREAIRVSKIPDAKSPLPVFAYTRIVFTDQVLKFLSQDELVYTFGETVALGASGIVIWGTLSIMRSMKSCLLLDNYMETILNPYIINVTLAAKMCSQVLCQEQGVCIRKNWNSSDYLHLNPDNFAIQLEKGGKFTVRGKPTLEDLEQFSEKFYCSCYSTLSCKEKADVKDTDAVDVCIADGVCIDAFLKPPMETEEPQIFY

SEQ ID NO: 354 - protein, 447 aa, Artificial Sequence
  Mature PH20 36-482 with T at a position corresponding to amino acid residue 413
LNFRAPPVIPNVPFLWAWNAPSEFCLGKFDEPLDMSLFSFIGSPRINATGQGVTIFYVDRLGYYPYIDSITGVTVNGGIPQKISLQDHLDKAKKDITFYMPVDNLGMAVIDWEEWRPTWARNWKPKDVYKNRSIELVQQQNVQLSLTEATEKAKQEFEKAGKDFLVETIKLGKLLRPNHLWGYYLFPDCYNHHYKKPGYNGSCFNVEIKRNDDLSWLWNESTALYPSIYLNTQQSPVAATLYVRNRVREAIRVSKIPDAKSPLPVFAYTRIVFTDQVLKFLSQDELVYTFGETVALGASGIVIWGTLSIMRSMKSCLLLDNYMETILNPYIINVTLAAKMCSQVLCQEQGVCIRKNWNSSDYLHLNPDNFAIQLEKGGKFTVRGKPTLEDLEQFSEKFYCSCYSTLSCKEKATVKDTDAVDVCIADGVCIDAFLKPPMETEEPQIFY

SEQ ID NO: 355 - protein, 447 aa, Artificial Sequence
  Mature PH20 36-482 with W at a position corresponding to amino acid residue 415
LNFRAPPVIPNVPFLWAWNAPSEFCLGKFDEPLDMSLFSFIGSPRINATGQGVTIFYVDRLGYYPYIDSITGVTVNGGIPQKISLQDHLDKAKKDITFYMPVDNLGMAVIDWEEWRPTWARNWKPKDVYKNRSIELVQQQNVQLSLTEATEKAKQEFEKAGKDFLVETIKLGKLLRPNHLWGYYLFPDCYNHHYKKPGYNGSCFNVEIKRNDDLSWLWNESTALYPSIYLNTQQSPVAATLYVRNRVREAIRVSKIPDAKSPLPVFAYTRIVFTDQVLKFLSQDELVYTFGETVALGASGIVIWGTLSIMRSMKSCLLLDNYMETILNPYIINVTLAAKMCSQVLCQEQGVCIRKNWNSSDYLHLNPDNFAIQLEKGGKFTVRGKPTLEDLEQFSEKFYCSCYSTLSCKEKADVWDTDAVDVCIADGVCIDAFLKPPMETEEPQIFY

SEQ ID NO: 356 - protein, 447 aa, Artificial Sequence
  Mature PH20 36-482 with L at a position corresponding to amino acid residue 417
LNFRAPPVIPNVPFLWAWNAPSEFCLGKFDEPLDMSLFSFIGSPRINATGQGVTIFYVDRLGYYPYIDSITGVTVNGGIPQKISLQDHLDKAKKDITFYMPVDNLGMAVIDWEEWRPTWARNWKPKDVYKNRSIELVQQQNVQLSLTEATEKAKQEFEKAGKDFLVETIKLGKLLRPNHLWGYYLFPDCYNHHYKKPGYNGSCFNVEIKRNDDLSWLWNESTALYPSIYLNTQQSPVAATLYVRNRVREAIRVSKIPDAKSPLPVFAYTRIVFTDQVLKFLSQDELVYTFGETVALGASGIVIWGTLSIMRSMKSCLLLDNYMETILNPYIINVTLAAKMCSQVLCQEQGVCIRKNWNSSDYLHLNPDNFAIQLEKGGKFTVRGKPTLEDLEQFSEKFYCSCYSTLSCKEKADVKDLDAVDVCIADGVCIDAFLKPPMETEEPQIFY

SEQ ID NO: 357 - protein, 447 aa, Artificial Sequence
  Mature PH20 36-482 with L at a position corresponding to amino acid residue 419
LNFRAPPVIPNVPFLWAWNAPSEFCLGKFDEPLDMSLFSFIGSPRINATGQGVTIFYVDRLGYYPYIDSITGVTVNGGIPQKISLQDHLDKAKKDITFYMPVDNLGMAVIDWEEWRPTWARNWKPKDVYKNRSIELVQQQNVQLSLTEATEKAKQEFEKAGKDFLVETIKLGKLLRPNHLWGYYLFPDCYNHHYKKPGYNGSCFNVEIKRNDDLSWLWNESTALYPSIYLNTQQSPVAATLYVRNRVREAIRVSKIPDAKSPLPVFAYTRIVFTDQVLKFLSQDELVYTFGETVALGASGIVIWGTLSIMRSMKSCLLLDNYMETILNPYIINVTLAAKMCSQVLCQEQGVCIRKNWNSSDYLHLNPDNFAIQLEKGGKFTVRGKPTLEDLEQFSEKFYCSCYSTLSCKEKADVKDTDLVDVCIADGVCIDAFLKPPMETEEPQIFY

SEQ ID NO: 358 - protein, 447 aa, Artificial Sequence
  Mature PH20 36-482 with I at a position corresponding to amino acid residue 421
LNFRAPPVIPNVPFLWAWNAPSEFCLGKFDEPLDMSLFSFIGSPRINATGQGVTIFYVDRLGYYPYIDSITGVTVNGGIPQKISLQDHLDKAKKDITFYMPVDNLGMAVIDWEEWRPTWARNWKPKDVYKNRSIELVQQQNVQLSLTEATEKAKQEFEKAGKDFLVETIKLGKLLRPNHLWGYYLFPDCYNHHYKKPGYNGSCFNVEIKRNDDLSWLWNESTALYPSIYLNTQQSPVAATLYVRNRVREAIRVSKIPDAKSPLPVFAYTRIVFTDQVLKFLSQDELVYTFGETVALGASGIVIWGTLSIMRSMKSCLLLDNYMETILNPYIINVTLAAKMCSQVLCQEQGVCIRKNWNSSDYLHLNPDNFAIQLEKGGKFTVRGKPTLEDLEQFSEKFYCSCYSTLSCKEKADVKDTDAVIVCIADGVCIDAFLKPPMETEEPQIFY

SEQ ID NO: 359 - protein, 447 aa, Artificial Sequence
  Mature PH20 36-482 with F at a position corresponding to amino acid residue 67
LNFRAPPVIPNVPFLWAWNAPSEFCLGKFDEPLDMSLFSFIGSPRINATGQGVTIFYVDRLGYYPYFDSITGVTVNGGIPQKISLQDHLDKAKKDITFYMPVDNLGMAVIDWEEWRPTWARNWKPKDVYKNRSIELVQQQNVQLSLTEATEKAKQEFEKAGKDFLVETIKLGKLLRPNHLWGYYLFPDCYNHHYKKPGYNGSCFNVEIKRNDDLSWLWNESTALYPSIYLNTQQSPVAATLYVRNRVREAIRVSKIPDAKSPLPVFAYTRIVFTDQVLKFLSQDELVYTFGETVALGASGIVIWGTLSIMRSMKSCLLLDNYMETILNPYIINVTLAAKMCSQVLCQEQGVCIRKNWNSSDYLHLNPDNFAIQLEKGGKFTVRGKPTLEDLEQFSEKFYCSCYSTLSCKEKADVKDTDAVDVCIADGVCIDAFLKPPMETEEPQIFY

SEQ ID NO: 360 - protein, 447 aa, Artificial Sequence
  Mature PH20 36-482 with A at a position corresponding to amino acid residue 69
LNFRAPPVIPNVPFLWAWNAPSEFCLGKFDEPLDMSLFSFIGSPRINATGQGVTIFYVDRLGYYPYIDAITGVTVNGGIPQKISLQDHLDKAKKDITFYMPVDNLGMAVIDWEEWRPTWARNWKPKDVYKNRSIELVQQQNVQLSLTEATEKAKQEFEKAGKDFLVETIKLGKLLRPNHLWGYYLFPDCYNHHYKKPGYNGSCFNVEIKRNDDLSWLWNESTALYPSIYLNTQQSPVAATLYVRNRVREAIRVSKIPDAKSPLPVFAYTRIVFTDQVLKFLSQDELVYTFGETVALGASGIVIWGTLSIMRSMKSCLLLDNYMETILNPYIINVTLAAKMCSQVLCQEQGVCIRKNWNSSDYLHLNPDNFAIQLEKGGKFTVRGKPTLEDLEQFSEKFYCSCYSTLSCKEKADVKDTDAVDVCIADGVCIDAFLKPPMETEEPQIFY

SEQ ID NO: 361 - protein, 447 aa, Artificial Sequence
  Mature PH20 36-482 with N at a position corresponding to amino acid residue 222
LNFRAPPVIPNVPFLWAWNAPSEFCLGKFDEPLDMSLFSFIGSPRINATGQGVTIFYVDRLGYYPYIDSITGVTVNGGIPQKISLQDHLDKAKKDITFYMPVDNLGMAVIDWEEWRPTWARNWKPKDVYKNRSIELVQQQNVQLSLTEATEKAKQEFEKAGKDFLVETIKLGKLLRPNHLWGYYLFPDCYNHHYKKPGYNGSCFNVEIKRNDDLSWLWNESNALYPSIYLNTQQSPVAATLYVRNRVREAIRVSKIPDAKSPLPVFAYTRIVFTDQVLKFLSQDELVYTFGETVALGASGIVIWGTLSIMRSMKSCLLLDNYMETILNPYIINVTLAAKMCSQVLCQEQGVCIRKNWNSSDYLHLNPDNFAIQLEKGGKFTVRGKPTLEDLEQFSEKFYCSCYSTLSCKEKADVKDTDAVDVCIADGVCIDAFLKPPMETEEPQIFY

SEQ ID NO: 362 - protein, 447 aa, Artificial Sequence
  Mature PH20 36-482 with G at a position corresponding to amino acid residue 431
LNFRAPPVIPNVPFLWAWNAPSEFCLGKFDEPLDMSLFSFIGSPRINATGQGVTIFYVDRLGYYPYIDSITGVTVNGGIPQKISLQDHLDKAKKDITFYMPVDNLGMAVIDWEEWRPTWARNWKPKDVYKNRSIELVQQQNVQLSLTEATEKAKQEFEKAGKDFLVETIKLGKLLRPNHLWGYYLFPDCYNHHYKKPGYNGSCFNVEIKRNDDLSWLWNESTALYPSIYLNTQQSPVAATLYVRNRVREAIRVSKIPDAKSPLPVFAYTRIVFTDQVLKFLSQDELVYTFGETVALGASGIVIWGTLSIMRSMKSCLLLDNYMETILNPYIINVTLAAKMCSQVLCQEQGVCIRKNWNSSDYLHLNPDNFAIQLEKGGKFTVRGKPTLEDLEQFSEKFYCSCYSTLSCKEKADVKDTDAVDVCIADGVCIGAFLKPPMETEEPQIFY

SEQ ID NO: 363 - protein, 447 aa, Artificial Sequence
  Mature PH20 36-482 with T at a position corresponding to amino acid residue 263
LNFRAPPVIPNVPFLWAWNAPSEFCLGKFDEPLDMSLFSFIGSPRINATGQGVTIFYVDRLGYYPYIDSITGVTVNGGIPQKISLQDHLDKAKKDITFYMPVDNLGMAVIDWEEWRPTWARNWKPKDVYKNRSIELVQQQNVQLSLTEATEKAKQEFEKAGKDFLVETIKLGKLLRPNHLWGYYLFPDCYNHHYKKPGYNGSCFNVEIKRNDDLSWLWNESTALYPSIYLNTQQSPVAATLYVRNRVREAIRVSKIPDAKSPTPVFAYTRIVFTDQVLKFLSQDELVYTFGETVALGASGIVIWGTLSIMRSMKSCLLLDNYMETILNPYIINVTLAAKMCSQVLCQEQGVCIRKNWNSSDYLHLNPDNFAIQLEKGGKFTVRGKPTLEDLEQFSEKFYCSCYSTLSCKEKADVKDTDAVDVCIADGVCIDAFLKPPMETEEPQIFY

SEQ ID NO: 364 - protein, 447 aa, Artificial Sequence
  Mature PH20 36-482 with D at a position corresponding to amino acid residue 50
LNFRAPPVIPNVPFLWAWNAPSEFCLGKFDEPLDMSLFSFIGSPRINATDQGVTIFYVDRLGYYPYIDSITGVTVNGGIPQKISLQDHLDKAKKDITFYMPVDNLGMAVIDWEEWRPTWARNWKPKDVYKNRSIELVQQQNVQLSLTEATEKAKQEFEKAGKDFLVETIKLGKLLRPNHLWGYYLFPDCYNHHYKKPGYNGSCFNVEIKRNDDLSWLWNESTALYPSIYLNTQQSPVAATLYVRNRVREAIRVSKIPDAKSPLPVFAYTRIVFTDQVLKFLSQDELVYTFGETVALGASGIVIWGTLSIMRSMKSCLLLDNYMETILNPYIINVTLAAKMCSQVLCQEQGVCIRKNWNSSDYLHLNPDNFAIQLEKGGKFTVRGKPTLEDLEQFSEKFYCSCYSTLSCKEKADVKDTDAVDVCIADGVCIDAFLKPPMETEEPQIFY

SEQ ID NO: 365 - protein, 447 aa, Artificial Sequence
  Mature PH20 36-482 with I at a position corresponding to amino acid residue 434
LNFRAPPVIPNVPFLWAWNAPSEFCLGKFDEPLDMSLFSFIGSPRINATGQGVTIFYVDRLGYYPYIDSITGVTVNGGIPQKISLQDHLDKAKKDITFYMPVDNLGMAVIDWEEWRPTWARNWKPKDVYKNRSIELVQQQNVQLSLTEATEKAKQEFEKAGKDFLVETIKLGKLLRPNHLWGYYLFPDCYNHHYKKPGYNGSCFNVEIKRNDDLSWLWNESTALYPSIYLNTQQSPVAATLYVRNRVREAIRVSKIPDAKSPLPVFAYTRIVFTDQVLKFLSQDELVYTFGETVALGASGIVIWGTLSIMRSMKSCLLLDNYMETILNPYIINVTLAAKMCSQVLCQEQGVCIRKNWNSSDYLHLNPDNFAIQLEKGGKFTVRGKPTLEDLEQFSEKFYCSCYSTLSCKEKADVKDTDAVDVCIADGVCIDAFIKPPMETEEPQIFY

SEQ ID NO: 366 - protein, 447 aa, Artificial Sequence
  Mature PH20 36-482 with M at a position corresponding to amino acid residue 434
LNFRAPPVIPNVPFLWAWNAPSEFCLGKFDEPLDMSLFSFIGSPRINATGQGVTIFYVDRLGYYPYIDSITGVTVNGGIPQKISLQDHLDKAKKDITFYMPVDNLGMAVIDWEEWRPTWARNWKPKDVYKNRSIELVQQQNVQLSLTEATEKAKQEFEKAGKDFLVETIKLGKLLRPNHLWGYYLFPDCYNHHYKKPGYNGSCFNVEIKRNDDLSWLWNESTALYPSIYLNTQQSPVAATLYVRNRVREAIRVSKIPDAKSPLPVFAYTRIVFTDQVLKFLSQDELVYTFGETVALGASGIVIWGTLSIMRSMKSCLLLDNYMETILNPYIINVTLAAKMCSQVLCQEQGVCIRKNWNSSDYLHLNPDNFAIQLEKGGKFTVRGKPTLEDLEQFSEKFYCSCYSTLSCKEKADVKDTDAVDVCIADGVCIDAFMKPPMETEEPQIFY

SEQ ID NO: 367 - protein, 447 aa, Artificial Sequence
  Mature PH20 36-482 with H at a position corresponding to amino acid residue 435
LNFRAPPVIPNVPFLWAWNAPSEFCLGKFDEPLDMSLFSFIGSPRINATGQGVTIFYVDRLGYYPYIDSITGVTVNGGIPQKISLQDHLDKAKKDITFYMPVDNLGMAVIDWEEWRPTWARNWKPKDVYKNRSIELVQQQNVQLSLTEATEKAKQEFEKAGKDFLVETIKLGKLLRPNHLWGYYLFPDCYNHHYKKPGYNGSCFNVEIKRNDDLSWLWNESTALYPSIYLNTQQSPVAATLYVRNRVREAIRVSKIPDAKSPLPVFAYTRIVFTDQVLKFLSQDELVYTFGETVALGASGIVIWGTLSIMRSMKSCLLLDNYMETILNPYIINVTLAAKMCSQVLCQEQGVCIRKNWNSSDYLHLNPDNFAIQLEKGGKFTVRGKPTLEDLEQFSEKFYCSCYSTLSCKEKADVKDTDAVDVCIADGVCIDAFLHPPMETEEPQIFY

SEQ ID NO: 368 - protein, 447 aa, Artificial Sequence
  Mature PH20 36-482 with Q at a position corresponding to amino acid residue 39
LNFRAPPVIPNVPFLWAWNAPSEFCLGKFDEPLDMSLFQFIGSPRINATGQGVTIFYVDRLGYYPYIDSITGVTVNGGIPQKISLQDHLDKAKKDITFYMPVDNLGMAVIDWEEWRPTWARNWKPKDVYKNRSIELVQQQNVQLSLTEATEKAKQEFEKAGKDFLVETIKLGKLLRPNHLWGYYLFPDCYNHHYKKPGYNGSCFNVEIKRNDDLSWLWNESTALYPSIYLNTQQSPVAATLYVRNRVREAIRVSKIPDAKSPLPVFAYTRIVFTDQVLKFLSQDELVYTFGETVALGASGIVIWGTLSIMRSMKSCLLLDNYMETILNPYIINVTLAAKMCSQVLCQEQGVCIRKNWNSSDYLHLNPDNFAIQLEKGGKFTVRGKPTLEDLEQFSEKFYCSCYSTLSCKEKADVKDTDAVDVCIADGVCIDAFLKPPMETEEPQIFY

SEQ ID NO: 369 - protein, 447 aa, Artificial Sequence
  Mature PH20 36-482 with H at a position corresponding to amino acid residue 215
LNFRAPPVIPNVPFLWAWNAPSEFCLGKFDEPLDMSLFSFIGSPRINATGQGVTIFYVDRLGYYPYIDSITGVTVNGGIPQKISLQDHLDKAKKDITFYMPVDNLGMAVIDWEEWRPTWARNWKPKDVYKNRSIELVQQQNVQLSLTEATEKAKQEFEKAGKDFLVETIKLGKLLRPNHLWGYYLFPDCYNHHYKKPGYNGSCFNVEIKRNDDLHWLWNESTALYPSIYLNTQQSPVAATLYVRNRVREAIRVSKIPDAKSPLPVFAYTRIVFTDQVLKFLSQDELVYTFGETVALGASGIVIWGTLSIMRSMKSCLLLDNYMETILNPYIINVTLAAKMCSQVLCQEQGVCIRKNWNSSDYLHLNPDNFAIQLEKGGKFTVRGKPTLEDLEQFSEKFYCSCYSTLSCKEKADVKDTDAVDVCIADGVCIDAFLKPPMETEEPQIFY

SEQ ID NO: 370 - protein, 447 aa, Artificial Sequence
  Mature PH20 36-482 with T at a position corresponding to amino acid residue 439
LNFRAPPVIPNVPFLWAWNAPSEFCLGKFDEPLDMSLFSFIGSPRINATGQGVTIFYVDRLGYYPYIDSITGVTVNGGIPQKISLQDHLDKAKKDITFYMPVDNLGMAVIDWEEWRPTWARNWKPKDVYKNRSIELVQQQNVQLSLTEATEKAKQEFEKAGKDFLVETIKLGKLLRPNHLWGYYLFPDCYNHHYKKPGYNGSCFNVEIKRNDDLSWLWNESTALYPSIYLNTQQSPVAATLYVRNRVREAIRVSKIPDAKSPLPVFAYTRIVFTDQVLKFLSQDELVYTFGETVALGASGIVIWGTLSIMRSMKSCLLLDNYMETILNPYIINVTLAAKMCSQVLCQEQGVCIRKNWNSSDYLHLNPDNFAIQLEKGGKFTVRGKPTLEDLEQFSEKFYCSCYSTLSCKEKADVKDTDAVDVCIADGVCIDAFLKPPMTTEEPQIFY

SEQ ID NO: 371 - protein, 447 aa, Artificial Sequence
  Mature PH20 36-482 with M at a position corresponding to amino acid residue 440
LNFRAPPVIPNVPFLWAWNAPSEFCLGKFDEPLDMSLFSFIGSPRINATGQGVTIFYVDRLGYYPYIDSITGVTVNGGIPQKISLQDHLDKAKKDITFYMPVDNLGMAVIDWEEWRPTWARNWKPKDVYKNRSIELVQQQNVQLSLTEATEKAKQEFEKAGKDFLVETIKLGKLLRPNHLWGYYLFPDCYNHHYKKPGYNGSCFNVEIKRNDDLSWLWNESTALYPSIYLNTQQSPVAATLYVRNRVREAIRVSKIPDAKSPLPVFAYTRIVFTDQVLKFLSQDELVYTFGETVALGASGIVIWGTLSIMRSMKSCLLLDNYMETILNPYIINVTLAAKMCSQVLCQEQGVCIRKNWNSSDYLHLNPDNFAIQLEKGGKFTVRGKPTLEDLEQFSEKFYCSCYSTLSCKEKADVKDTDAVDVCIADGVCIDAFLKPPMEMEEPQIFY

SEQ ID NO: 372 - protein, 447 aa, Artificial Sequence
  Mature PH20 36-482 with L at a position corresponding to amino acid residue 150
LNFRAPPVIPNVPFLWAWNAPSEFCLGKFDEPLDMSLFSFIGSPRINATGQGVTIFYVDRLGYYPYIDSITGVTVNGGIPQKISLQDHLDKAKKDITFYMPVDNLGMAVIDWEEWRPTWARNWKPKDVYKNRSIELVQQQNVQLSLTEALEKAKQEFEKAGKDFLVETIKLGKLLRPNHLWGYYLFPDCYNHHYKKPGYNGSCFNVEIKRNDDLSWLWNESTALYPSIYLNTQQSPVAATLYVRNRVREAIRVSKIPDAKSPLPVFAYTRIVFTDQVLKFLSQDELVYTFGETVALGASGIVIWGTLSIMRSMKSCLLLDNYMETILNPYIINVTLAAKMCSQVLCQEQGVCIRKNWNSSDYLHLNPDNFAIQLEKGGKFTVRGKPTLEDLEQFSEKFYCSCYSTLSCKEKADVKDTDAVDVCIADGVCIDAFLKPPMETEEPQIFY

SEQ ID NO: 373 - protein, 447 aa, Artificial Sequence
  Mature PH20 36-482 with V at a position corresponding to amino acid residue 441
LNFRAPPVIPNVPFLWAWNAPSEFCLGKFDEPLDMSLFSFIGSPRINATGQGVTIFYVDRLGYYPYIDSITGVTVNGGIPQKISLQDHLDKAKKDITFYMPVDNLGMAVIDWEEWRPTWARNWKPKDVYKNRSIELVQQQNVQLSLTEATEKAKQEFEKAGKDFLVETIKLGKLLRPNHLWGYYLFPDCYNHHYKKPGYNGSCFNVEIKRNDDLSWLWNESTALYPSIYLNTQQSPVAATLYVRNRVREAIRVSKIPDAKSPLPVFAYTRIVFTDQVLKFLSQDELVYTFGETVALGASGIVIWGTLSIMRSMKSCLLLDNYMETILNPYIINVTLAAKMCSQVLCQEQGVCIRKNWNSSDYLHLNPDNFAIQLEKGGKFTVRGKPTLEDLEQFSEKFYCSCYSTLSCKEKADVKDTDAVDVCIADGVCIDAFLKPPMETVEPQIFY

SEQ ID NO: 374 - protein, 447 aa, Artificial Sequence
  Mature PH20 36-482 with P at a position corresponding to amino acid residue 442
LNFRAPPVIPNVPFLWAWNAPSEFCLGKFDEPLDMSLFSFIGSPRINATGQGVTIFYVDRLGYYPYIDSITGVTVNGGIPQKISLQDHLDKAKKDITFYMPVDNLGMAVIDWEEWRPTWARNWKPKDVYKNRSIELVQQQNVQLSLTEATEKAKQEFEKAGKDFLVETIKLGKLLRPNHLWGYYLFPDCYNHHYKKPGYNGSCFNVEIKRNDDLSWLWNESTALYPSIYLNTQQSPVAATLYVRNRVREAIRVSKIPDAKSPLPVFAYTRIVFTDQVLKFLSQDELVYTFGETVALGASGIVIWGTLSIMRSMKSCLLLDNYMETILNPYIINVTLAAKMCSQVLCQEQGVCIRKNWNSSDYLHLNPDNFAIQLEKGGKFTVRGKPTLEDLEQFSEKFYCSCYSTLSCKEKADVKDTDAVDVCIADGVCIDAFLKPPMETEPPQIFY

SEQ ID NO: 375 - protein, 447 aa, Artificial Sequence
  Mature PH20 36-482 with T at a position corresponding to amino acid residue 196
LNFRAPPVIPNVPFLWAWNAPSEFCLGKFDEPLDMSLFSFIGSPRINATGQGVTIFYVDRLGYYPYIDSITGVTVNGGIPQKISLQDHLDKAKKDITFYMPVDNLGMAVIDWEEWRPTWARNWKPKDVYKNRSIELVQQQNVQLSLTEATEKAKQEFEKAGKDFLVETIKLGKLLRPNHLWGYYLFPDCYNHHYKTPGYNGSCFNVEIKRNDDLSWLWNESTALYPSIYLNTQQSPVAATLYVRNRVREAIRVSKIPDAKSPLPVFAYTRIVFTDQVLKFLSQDELVYTFGETVALGASGIVIWGTLSIMRSMKSCLLLDNYMETILNPYIINVTLAAKMCSQVLCQEQGVCIRKNWNSSDYLHLNPDNFAIQLEKGGKFTVRGKPTLEDLEQFSEKFYCSCYSTLSCKEKADVKDTDAVDVCIADGVCIDAFLKPPMETEEPQIFY

SEQ ID NO: 376 - protein, 447 aa, Artificial Sequence
  Mature PH20 36-482 with V at a position corresponding to amino acid residue 92
LNFRAPPVIPNVPFLWAWNAPSEFCLGKFDEPLDMSLFSFIGSPRINATGQGVTIFYVDRLGYYPYIDSITGVTVNGGIPQKISLQDHLDKVKKDITFYMPVDNLGMAVIDWEEWRPTWARNWKPKDVYKNRSIELVQQQNVQLSLTEATEKAKQEFEKAGKDFLVETIKLGKLLRPNHLWGYYLFPDCYNHHYKKPGYNGSCFNVEIKRNDDLSWLWNESTALYPSIYLNTQQSPVAATLYVRNRVREAIRVSKIPDAKSPLPVFAYTRIVFTDQVLKFLSQDELVYTFGETVALGASGIVIWGTLSIMRSMKSCLLLDNYMETILNPYIINVTLAAKMCSQVLCQEQGVCIRKNWNSSDYLHLNPDNFAIQLEKGGKFTVRGKPTLEDLEQFSEKFYCSCYSTLSCKEKADVKDTDAVDVCIADGVCIDAFLKPPMETEEPQIFY

SEQ ID NO: 377 - protein, 447 aa, Artificial Sequence
  Mature PH20 36-482 with Y at a position corresponding to amino acid residue 160
LNFRAPPVIPNVPFLWAWNAPSEFCLGKFDEPLDMSLFSFIGSPRINATGQGVTIFYVDRLGYYPYIDSITGVTVNGGIPQKISLQDHLDKAKKDITFYMPVDNLGMAVIDWEEWRPTWARNWKPKDVYKNRSIELVQQQNVQLSLTEATEKAKQEFEKYGKDFLVETIKLGKLLRPNHLWGYYLFPDCYNHHYKKPGYNGSCFNVEIKRNDDLSWLWNESTALYPSIYLNTQQSPVAATLYVRNRVREAIRVSKIPDAKSPLPVFAYTRIVFTDQVLKFLSQDELVYTFGETVALGASGIVIWGTLSIMRSMKSCLLLDNYMETILNPYIINVTLAAKMCSQVLCQEQGVCIRKNWNSSDYLHLNPDNFAIQLEKGGKFTVRGKPTLEDLEQFSEKFYCSCYSTLSCKEKADVKDTDAVDVCIADGVCIDAFLKPPMETEEPQIFY

SEQ ID NO: 378 - protein, 447 aa, Artificial Sequence
  Mature PH20 36-482 with G at a position corresponding to amino acid residue 311
LNFRAPPVIPNVPFLWAWNAPSEFCLGKFDEPLDMSLFSFIGSPRINATGQGVTIFYVDRLGYYPYIDSITGVTVNGGIPQKISLQDHLDKAKKDITFYMPVDNLGMAVIDWEEWRPTWARNWKPKDVYKNRSIELVQQQNVQLSLTEATEKAKQEFEKAGKDFLVETIKLGKLLRPNHLWGYYLFPDCYNHHYKKPGYNGSCFNVEIKRNDDLSWLWNESTALYPSIYLNTQQSPVAATLYVRNRVREAIRVSKIPDAKSPLPVFAYTRIVFTDQVLKFLSQDELVYTFGETVALGASGIVIWGTLSIMGSMKSCLLLDNYMETILNPYIINVTLAAKMCSQVLCQEQGVCIRKNWNSSDYLHLNPDNFAIQLEKGGKFTVRGKPTLEDLEQFSEKFYCSCYSTLSCKEKADVKDTDAVDVCIADGVCIDAFLKPPMETEEPQIFY

SEQ ID NO: 379 - protein, 447 aa, Artificial Sequence
  Mature PH20 36-482 with K at a position corresponding to amino acid residue 205
LNFRAPPVIPNVPFLWAWNAPSEFCLGKFDEPLDMSLFSFIGSPRINATGQGVTIFYVDRLGYYPYIDSITGVTVNGGIPQKISLQDHLDKAKKDITFYMPVDNLGMAVIDWEEWRPTWARNWKPKDVYKNRSIELVQQQNVQLSLTEATEKAKQEFEKAGKDFLVETIKLGKLLRPNHLWGYYLFPDCYNHHYKKPGYNGSCFKVEIKRNDDLSWLWNESTALYPSIYLNTQQSPVAATLYVRNRVREAIRVSKIPDAKSPLPVFAYTRIVFTDQVLKFLSQDELVYTFGETVALGASGIVIWGTLSIMRSMKSCLLLDNYMETILNPYIINVTLAAKMCSQVLCQEQGVCIRKNWNSSDYLHLNPDNFAIQLEKGGKFTVRGKPTLEDLEQFSEKFYCSCYSTLSCKEKADVKDTDAVDVCIADGVCIDAFLKPPMETEEPQIFY

SEQ ID NO: 380 - protein, 447 aa, Artificial Sequence
  Mature PH20 36-482 with L at a position corresponding to amino acid residue 31
LNFRAPPVIPNVPFLWAWNAPSEFCLGKFDLPLDMSLFSFIGSPRINATGQGVTIFYVDRLGYYPYIDSITGVTVNGGIPQKISLQDHLDKAKKDITFYMPVDNLGMAVIDWEEWRPTWARNWKPKDVYKNRSIELVQQQNVQLSLTEATEKAKQEFEKAGKDFLVETIKLGKLLRPNHLWGYYLFPDCYNHHYKKPGYNGSCFNVEIKRNDDLSWLWNESTALYPSIYLNTQQSPVAATLYVRNRVREAIRVSKIPDAKSPLPVFAYTRIVFTDQVLKFLSQDELVYTFGETVALGASGIVIWGTLSIMRSMKSCLLLDNYMETILNPYIINVTLAAKMCSQVLCQEQGVCIRKNWNSSDYLHLNPDNFAIQLEKGGKFTVRGKPTLEDLEQFSEKFYCSCYSTLSCKEKADVKDTDAVDVCIADGVCIDAFLKPPMETEEPQIFY

SEQ ID NO: 381 - protein, 447 aa, Artificial Sequence
  Mature PH20 36-482 with D at a position corresponding to amino acid residue 447
LNFRAPPVIPNVPFLWAWNAPSEFCLGKFDEPLDMSLFSFIGSPRINATGQGVTIFYVDRLGYYPYIDSITGVTVNGGIPQKISLQDHLDKAKKDITFYMPVDNLGMAVIDWEEWRPTWARNWKPKDVYKNRSIELVQQQNVQLSLTEATEKAKQEFEKAGKDFLVETIKLGKLLRPNHLWGYYLFPDCYNHHYKKPGYNGSCFNVEIKRNDDLSWLWNESTALYPSIYLNTQQSPVAATLYVRNRVREAIRVSKIPDAKSPLPVFAYTRIVFTDQVLKFLSQDELVYTFGETVALGASGIVIWGTLSIMRSMKSCLLLDNYMETILNPYIINVTLAAKMCSQVLCQEQGVCIRKNWNSSDYLHLNPDNFAIQLEKGGKFTVRGKPTLEDLEQFSEKFYCSCYSTLSCKEKADVKDTDAVDVCIADGVCIDAFLKPPMETEEPQIFD

SEQ ID NO: 382 - protein, 447 aa, Artificial Sequence
  Mature PH20 36-482 with W at a position corresponding to amino acid residue 34
LNFRAPPVIPNVPFLWAWNAPSEFCLGKFDEPLWMSLFSFIGSPRINATGQGVTIFYVDRLGYYPYIDSITGVTVNGGIPQKISLQDHLDKAKKDITFYMPVDNLGMAVIDWEEWRPTWARNWKPKDVYKNRSIELVQQQNVQLSLTEATEKAKQEFEKAGKDFLVETIKLGKLLRPNHLWGYYLFPDCYNHHYKKPGYNGSCFNVEIKRNDDLSWLWNESTALYPSIYLNTQQSPVAATLYVRNRVREAIRVSKIPDAKSPLPVFAYTRIVFTDQVLKFLSQDELVYTFGETVALGASGIVIWGTLSIMRSMKSCLLLDNYMETILNPYIINVTLAAKMCSQVLCQEQGVCIRKNWNSSDYLHLNPDNFAIQLEKGGKFTVRGKPTLEDLEQFSEKFYCSCYSTLSCKEKADVKDTDAVDVCIADGVCIDAFLKPPMETEEPQIFY

SEQ ID NO: 383 - protein, 447 aa, Artificial Sequence
  Mature PH20 36-482 with K at a position corresponding to amino acid residue 58
LNFRAPPVIPNVPFLWAWNAPSEFCLGKFDEPLDMSLFSFIGSPRINATGQGVTIFYKDRLGYYPYIDSITGVTVNGGIPQKISLQDHLDKAKKDITFYMPVDNLGMAVIDWEEWRPTWARNWKPKDVYKNRSIELVQQQNVQLSLTEATEKAKQEFEKAGKDFLVETIKLGKLLRPNHLWGYYLFPDCYNHHYKKPGYNGSCFNVEIKRNDDLSWLWNESTALYPSIYLNTQQSPVAATLYVRNRVREAIRVSKIPDAKSPLPVFAYTRIVFTDQVLKFLSQDELVYTFGETVALGASGIVIWGTLSIMRSMKSCLLLDNYMETILNPYIINVTLAAKMCSQVLCQEQGVCIRKNWNSSDYLHLNPDNFAIQLEKGGKFTVRGKPTLEDLEQFSEKFYCSCYSTLSCKEKADVKDTDAVDVCIADGVCIDAFLKPPMETEEPQIFY

SEQ ID NO: 384 - protein, 447 aa, Artificial Sequence
  Mature PH20 36-482 with V at a position corresponding to amino acid residue 220
LNFRAPPVIPNVPFLWAWNAPSEFCLGKFDEPLDMSLFSFIGSPRINATGQGVTIFYVDRLGYYPYIDSITGVTVNGGIPQKISLQDHLDKAKKDITFYMPVDNLGMAVIDWEEWRPTWARNWKPKDVYKNRSIELVQQQNVQLSLTEATEKAKQEFEKAGKDFLVETIKLGKLLRPNHLWGYYLFPDCYNHHYKKPGYNGSCFNVEIKRNDDLSWLWNVSTALYPSIYLNTQQSPVAATLYVRNRVREAIRVSKIPDAKSPLPVFAYTRIVFTDQVLKFLSQDELVYTFGETVALGASGIVIWGTLSIMRSMKSCLLLDNYMETILNPYIINVTLAAKMCSQVLCQEQGVCIRKNWNSSDYLHLNPDNFAIQLEKGGKFTVRGKPTLEDLEQFSEKFYCSCYSTLSCKEKADVKDTDAVDVCIADGVCIDAFLKPPMETEEPQIFY

SEQ ID NO: 385 - protein, 447 aa, Artificial Sequence
  Mature PH20 36-482 with K at a position corresponding to amino acid residue 60
LNFRAPPVIPNVPFLWAWNAPSEFCLGKFDEPLDMSLFSFIGSPRINATGQGVTIFYVDKLGYYPYIDSITGVTVNGGIPQKISLQDHLDKAKKDITFYMPVDNLGMAVIDWEEWRPTWARNWKPKDVYKNRSIELVQQQNVQLSLTEATEKAKQEFEKAGKDFLVETIKLGKLLRPNHLWGYYLFPDCYNHHYKKPGYNGSCFNVEIKRNDDLSWLWNESTALYPSIYLNTQQSPVAATLYVRNRVREAIRVSKIPDAKSPLPVFAYTRIVFTDQVLKFLSQDELVYTFGETVALGASGIVIWGTLSIMRSMKSCLLLDNYMETILNPYIINVTLAAKMCSQVLCQEQGVCIRKNWNSSDYLHLNPDNFAIQLEKGGKFTVRGKPTLEDLEQFSEKFYCSCYSTLSCKEKADVKDTDAVDVCIADGVCIDAFLKPPMETEEPQIFY

SEQ ID NO: 386 - protein, 447 aa, Artificial Sequence
  Mature PH20 36-482 with P at a position corresponding to amino acid residue 30
LNFRAPPVIPNVPFLWAWNAPSEFCLGKFPEPLDMSLFSFIGSPRINATGQGVTIFYVDRLGYYPYIDSITGVTVNGGIPQKISLQDHLDKAKKDITFYMPVDNLGMAVIDWEEWRPTWARNWKPKDVYKNRSIELVQQQNVQLSLTEATEKAKQEFEKAGKDFLVETIKLGKLLRPNHLWGYYLFPDCYNHHYKKPGYNGSCFNVEIKRNDDLSWLWNESTALYPSIYLNTQQSPVAATLYVRNRVREAIRVSKIPDAKSPLPVFAYTRIVFTDQVLKFLSQDELVYTFGETVALGASGIVIWGTLSIMRSMKSCLLLDNYMETILNPYIINVTLAAKMCSQVLCQEQGVCIRKNWNSSDYLHLNPDNFAIQLEKGGKFTVRGKPTLEDLEQFSEKFYCSCYSTLSCKEKADVKDTDAVDVCIADGVCIDAFLKPPMETEEPQIFY

SEQ ID NO: 387 - protein, 509 aa, Nomascus leucogenys
  precursor PH20 isoform 1
  ref <308>: DATABASE ACCESSION NUMBER: NCBI: XP_003261317
  ref <309>: DATABASE ENTRY DATE: 2011-05-06
MGVLKFKHIFFRSFVKSNGISQIVFTFLLIPRCLTLNFRAPPVIPNVPFLWAWNAPSEFCLGKFDEPLDMSLFSLTGSPRINVTGQGVTIFYVDRLGYYPYIDSITGVTVNGGIPQKISLQDHLDKAKQDITFYMPVDNLGMAVIDWEEWRPTWARNWKPKDVYKNRSIELVQQQNVQLSLAEATEKAKQEFEKAGKDFMVETIKLGKLLRPNHLWGYYLFPDCYNHHYKKPGYNGSCFNVEIKRNDDLSWLWNESTALYPSIYLNTQQSPVAATLYVRNRVREAIRVSKIPDAKSPLPVFVYARIVFTDQVLKFLSRDELVYTLGETVALGASGIVIWGSLSIVRSMKSCLLLDNYMETILNPYIINVTLAAKMCSQVLCQEQGVCIRKDWNSSDYLHLNPDNFAIQLEKGGKFTVRGKPTPEDLEQFSEKFYCSCYSTLSCKEKADVKDTDAVDVCIADGVCIDAFLKPPKETEESQIFYNASPSTLSATMFIVSILFLIISSVVSL

SEQ ID NO: 388 - protein, 474 aa, Nomascus leucogenys
  mature PH-20 isoform 1
LNFRAPPVIPNVPFLWAWNAPSEFCLGKFDEPLDMSLFSLTGSPRINVTGQGVTIFYVDRLGYYPYIDSITGVTVNGGIPQKISLQDHLDKAKQDITFYMPVDNLGMAVIDWEEWRPTWARNWKPKDVYKNRSIELVQQQNVQLSLAEATEKAKQEFEKAGKDFMVETIKLGKLLRPNHLWGYYLFPDCYNHHYKKPGYNGSCFNVEIKRNDDLSWLWNESTALYPSIYLNTQQSPVAATLYVRNRVREAIRVSKIPDAKSPLPVFVYARIVFTDQVLKFLSRDELVYTLGETVALGASGIVIWGSLSIVRSMKSCLLLDNYMETILNPYIINVTLAAKMCSQVLCQEQGVCIRKDWNSSDYLHLNPDNFAIQLEKGGKFTVRGKPTPEDLEQFSEKFYCSCYSTLSCKEKADVKDTDAVDVCIADGVCIDAFLKPPKETEESQIFYNASPSTLSATMFIVSILFLIISSVVSL

SEQ ID NO: 389 - protein, 509 aa, Callithrix jacchus
  precursor PH-20
  ref <308>: DATABASE ACCESSION NUMBER: NCBI: XP_002752103
  ref <309>: DATABASE ENTRY DATE: 2012-06-08
MGVLKFKHIFFRSFVKSSGVSQIVFTFLLIPCSLTLNFRAPPIIPNVPFLWAWNAPSEFCLGKFDEPLDMSLFSLIGSPRINVTGQGVTIFYVDRLGYYPYIDPTTGAVVNGGIPQKIALQDHLDKVRKDIIFYMPVDNLGMGVIDWEEWRPTWARNWKPKDIYKNKSIEMVQQRNVQLNLTQATDIAKQEFEKAAKDFMLETIKLGKALRPNHLWGYYLFPDCYNHHYKKPDYNGSCFNIEIKRNNDLSWLWNESTALYPSIYLNTQQSAVAAMLYVRNRVQEAIRVSKTPNANSPLPVFVYARLVFTDQVLRFLSQDELVYTLGETVALGASGIVIWGSLSIMRSMKSCLLLDTYMETVLNPYIINTTLAAKMCSQVLCQEQGVCIRKDWNSSDYLHLNPDNFAIETEKGGKFTVRGKPTYEDLEQFSEKFYCSCYTSLSCKVKADVKDTDAVDVCIADGVCIDASLKPPKETEESSQIFYNPSSSTPSAAIFIVAILFFISCVVSL

SEQ ID NO: 390 - protein, 474 aa, Callithrix jacchus
  mature PH-20
LNFRAPPIIPNVPFLWAWNAPSEFCLGKFDEPLDMSLFSLIGSPRINVTGQGVTIFYVDRLGYYPYIDPTTGAVVNGGIPQKIALQDHLDKVRKDIIFYMPVDNLGMGVIDWEEWRPTWARNWKPKDIYKNKSIEMVQQRNVQLNLTQATDIAKQEFEKAAKDFMLETIKLGKALRPNHLWGYYLFPDCYNHHYKKPDYNGSCFNIEIKRNNDLSWLWNESTALYPSIYLNTQQSAVAAMLYVRNRVQEAIRVSKTPNANSPLPVFVYARLVFTDQVLRFLSQDELVYTLGETVALGASGIVIWGSLSIMRSMKSCLLLDTYMETVLNPYIINTTLAAKMCSQVLCQEQGVCIRKDWNSSDYLHLNPDNFAIETEKGGKFTVRGKPTYEDLEQFSEKFYCSCYTSLSCKVKADVKDTDAVDVCIADGVCIDASLKPPKETEESSQIFYNPSSSTPSAAIFIVAILFFISCVVSL

SEQ ID NO: 391 - protein, 511 aa, Pongo abelii
  precursor PH-20 isoform 1
  ref <308>: DATABASE ACCESSION NUMBER: NCBI: XP_002818442
  ref <309>: DATABASE ENTRY DATE: 2012-06-17
MGVLKFKHIFFRSFVKSSGVSQIVLTFLLIPCCLTLNFRAPPIIPNMPFLWAWNAPSEFCLGKFDEPLDMSLFSLIGSPRINVTGQAVTIFYVDRLGYYPYIDSITGVTVNGGIPQKISLQDHLDKAKKDILFYMPVDNLGMAVIDWEEWRPTWARNWKPKDVYKNRSIELVQQQNVQLNLTEATEKAKQEFEKAGKDFMVETIKLGKLLRPNHLWGYYLFPDCYNHHYKKPGYNGSCFNVEIKRNDDLSWLWNESTALYPSIYLNTQQSPVAATLYVRNRVREAIRVSKIPDAKSPLPVFVYARIVFTDQVLKFLSQDELVYTFGETVALGASGIVIWGSLSIMRSMKSCLLLDNYMETILNPYIINVTLAAKMCSQVLCQEQGVCIRKDWNSSDYLHLNPDNFAIQLEKGGKFTVRGKPTLEDLEQFSEKFYCSCYSTLSCKEKADVKDTDAVDVCIADGVCIDAFLKPPMETEESQIFYNASPSTLSATMFIWRLEVWDQGISRMGFF

SEQ ID NO: 392 - protein, 476 aa, Pongo abelii
  mature PH-20 isoform 1
LNFRAPPIIPNMPFLWAWNAPSEFCLGKFDEPLDMSLFSLIGSPRINVTGQAVTIFYVDRLGYYPYIDSITGVTVNGGIPQKISLQDHLDKAKKDILFYMPVDNLGMAVIDWEEWRPTWARNWKPKDVYKNRSIELVQQQNVQLNLTEATEKAKQEFEKAGKDFMVETIKLGKLLRPNHLWGYYLFPDCYNHHYKKPGYNGSCFNVEIKRNDDLSWLWNESTALYPSIYLNTQQSPVAATLYVRNRVREAIRVSKIPDAKSPLPVFVYARIVFTDQVLKFLSQDELVYTFGETVALGASGIVIWGSLSIMRSMKSCLLLDNYMETILNPYIINVTLAAKMCSQVLCQEQGVCIRKDWNSSDYLHLNPDNFAIQLEKGGKFTVRGKPTLEDLEQFSEKFYCSCYSTLSCKEKADVKDTDAVDVCIADGVCIDAFLKPPMETEESQIFYNASPSTLSATMFIWRLEVWDQGISRMGFF

SEQ ID NO: 393 - protein, 21 aa, Homo sapiens
  Human insulin A chain
GIVEQCCTSICSLYQLENYCN

SEQ ID NO: 394 - protein, 30 aa, Homo sapiens
  Human Insulin B chain
FVNQHLCGSHLVEALYLVCGERGFFYTPKT

SEQ ID NO: 395 - protein, 30 aa, Homo sapiens
  Human Insulin B chain analog (Aspart Insulin)
FVNQHLCGSHLVEALYLVCGERGFFYTDKT

SEQ ID NO: 396 - protein, 30 aa, Homo sapiens
  Human Insulin B chain analog (Lispro insulin)
FVNQHLCGSHLVEALYLVCGERGFFYTKPT

SEQ ID NO: 397 - protein, 30 aa, Homo sapiens
  Human Insulin B chain analog (Glulisine insulin)
FVKQHLCGSHLVEALYLVCGERGFFYTPET

SEQ ID NO: 398 - protein, 22 aa, Artificial Sequence
  IgG kappa signal sequence
MDMRVPAQLLGLLLLWLPGARG

SEQ ID NO: 399 - protein, 509 aa, Pan troglodytes
  Precursor PH-20
  ref <308>: DATABASE ACCESSION NUMBER: GenBank: BAK62198
  ref <309>: DATABASE ENTRY DATE: 2011-08-20
MGVLKFKHIFFRSFVKSSGVSQIVFTFLLIPCCLTLNFRAPPVIPNVPFLWAWNAPSEFCLGKFDEPLDTSLFSFIGSPRINVTGQDVTIFYVDRLGYYPYIDSITGVTVNGGIPQKISLQDHLDKAKKDITFYMPVDNLGMAVIDWEEWRPTWARNWKPKDVYKNRSIELVQQQNVQLSLTEATEKAKQEFEKAGKDFLVETIKLGKLLRPNHLWGYYLFPDCYNHHYKKPGYNGSCFNVEIKRNDDLSWLWNESTALYPSIYLNTQQSPVAATLYARNRVQEAIRVSKIPDAKSPLPVFVYTRIVFTDQVLKFLSQDELVYTFGETVALGASGIVIWGTLSIMRSMKSCLLLDNYMETILNPYIINVTLAAKMCSQVLCQEQGVCIRKNWNSSDYLHLNPDNFAIQLEKGGKFTVRGKPTLEDLEQFSEKFYCSCYSTLSCKEKADVKDTDAVDVCIADGVYIDAFLKPPMETEESQIFYNASPSTLSATMFIVSILFLIISSVASL

SEQ ID NO: 400 - protein, 474 aa, Pan troglodytes
  Mature PH-20
LNFRAPPVIPNVPFLWAWNAPSEFCLGKFDEPLDTSLFSFIGSPRINVTGQDVTIFYVDRLGYYPYIDSITGVTVNGGIPQKISLQDHLDKAKKDITFYMPVDNLGMAVIDWEEWRPTWARNWKPKDVYKNRSIELVQQQNVQLSLTEATEKAKQEFEKAGKDFLVETIKLGKLLRPNHLWGYYLFPDCYNHHYKKPGYNGSCFNVEIKRNDDLSWLWNESTALYPSIYLNTQQSPVAATLYARNRVQEAIRVSKIPDAKSPLPVFVYTRIVFTDQVLKFLSQDELVYTFGETVALGASGIVIWGTLSIMRSMKSCLLLDNYMETILNPYIINVTLAAKMCSQVLCQEQGVCIRKNWNSSDYLHLNPDNFAIQLEKGGKFTVRGKPTLEDLEQFSEKFYCSCYSTLSCKEKADVKDTDAVDVCIADGVYIDAFLKPPMETEESQIFYNASPSTLSATMFIVSILFLIISSVASL

SEQ ID NO: 401 - protein, 450 aa, Bos taurus
  hyaluronidase
MRPFSLEVSLHLPWAMAAHLLPVCTLFLNLLSMTQGSRDPVVPNQPFTTIWNANTEWCMKKHGVDVDISIFDVVTNPGQTFRGPNMTIFYSSQLGTYPYYTSAGEPVFGGLPQNASLNAHLARTFQDILAAMPEPRFSGLAVIDWEAWRPRWAFNWDTKDIYRQRSRALVQKQHPDWLAPRVEAAAQDQFEGAAEEWMAGTLKLGQALRPQGLWGFYNFPECYNYDFKSPNYTGRCPLNICAQNDQLGWLWGQSRALYPSIYLPAALEGTKKTQMFVQHRVAEAFRVAAGAGDPKLPVLPYMQLFYDMTNHFLPAEELEHSLGESAAQGAAGVVLWVSWLSTSTKESCQAIKEYVDTTLGPSILNVTSGARLCSQVLCSGHGRCARRPSYPKARLILNSTSFSIKPTPGGGPLTLQGALSLEDRLRMAVEFECRCYRGWRGTRCEQWGMW

SEQ ID NO: 402 - protein, 331 aa, Vespula vulgaris
  hyaluronidase A
SERPKRVFNIYWNVPTFMCHQYDLYFDEVTNFNIKRNSKDDFQGDKIAIFYDPGEFPALLSLKDGKYKKRNGGVPQEGNITIHLQKFIENLDKIYPNRNFSGIGVIDFERWRPIFRQNWGNMKIHKNFSIDLVRNEHPTWNKKMIELEASKRFEKYARFFMEETLKLAKKTRKQADWGYYGYPYCFNMSPNNLVPECDVTAMHENDKMSWLFNNQNVLLPSVYVRQELTPDQRIGLVQGRVKEAVRISNNLKHSPKVLSYWWYVYQDETNTFLTETDVKKTFQEIVINGGDGIIIWGSSSDVNSLSKCKRLQDYLLTVLGPIAINVTEAVN

SEQ ID NO: 403 - protein, 340 aa, Vespula vulgaris
  hyaluronidase B
DRTIWPKKGFSIYWNIPTHFCHNFGVYFKELKQFNIKYNSMNNFRGETISLFYDPGNFPSMVLLKNGTYEIRNEGVPQKGNLTIHLEQFTKELDEIYPKKIAGGIGVIHFHNWRPIFRRNVDNLKINKDISIDLVRKEHPKWDKSMIEKEASNRFETSAKIFMEKTLKLAKEIRKKTEWGYHGYPHCLSGSTDKPSFDCDALSMSENDKMSWLFNNQNVLLPSIYLKNVLKPDEKIHLVQERLKEAIRISKNFKHLPKVLPYWWYTYQDKESIFLTEADVKNTFKEILTNGADGIIIWGVSYELTDRKRCEKLKEYLMKILGPIAFKVTKAVKENTPLNF

SEQ ID NO: 404 - protein, 382 aa, Apis mellifera
  hyaluronidase
MSRPLVITEGMMIGVLLMLAPINALLLGFVQSTPDNNKTVREFNVYWNVPTFMCHKYGLRFEEVSEKYGILQNWMDKFRGEEIAILYDPGMFPALLKDPNGNVVARNGGVPQLGNLTKHLQVFRDHLINQIPDKSFPGVGVIDFESWRPIFRQNWASLQPYKKLSVEVVRREHPFWDDQRVEQEAKRRFEKYGQLFMEETLKAAKRMRPAANWGYYAYPYCYNLTPNQPSAQCEATTMQENDKMSWLFESEDVLLPSVYLRWNLTSGERVGLVGGRVKEALRIARQMTTSRKKVLPYYWYKYQDRRDTDLSRADLEATLRKITDLGADGFIIWGSSDDINTKAKCLQFREYLNNELGPAVKRIALNNNANDRLTVDVSVDQV

SEQ ID NO: 405 - protein, 331 aa, Dolichovespula maculata
  hyaluronidase
SERPKRVFNIYWNVPTFMCHQYGLYFDEVTNFNIKHNSKDDFQGDKISIFYDPGEFPALLPLKEGNYKIRNGGVPQEGNITIHLQRFIENLDKTYPNRNFNGIGVIDFERWRPIFRQNWGNMMIHKKFSIDLVRNEHPFWDKKMIELEASKRFEKYARLFMEETLKLAKKTRKQADWGYYGYPYCFNMSPNNLVPDCDATAMLENDKMSWLFNNQNVLLPSVYIRHELTPDQRVGLVQGRVKEAVRISNNLKHSPKVLSYWWYVYQDDTNTFLTETDVKKTFQEIAINGGDGIIIWGSSSDVNSLSKCKRLREYLLTVLGPITVNVTETVN

SEQ ID NO: 406 - protein, 367 aa, Polistes annularis
  hyaluronidase
YVSLSPDSVFNIITDDISHQILSRSNCERSKRPKRVFSIYWNVPTFMCHQYGMNFDEVTDFNIKHNSKDNFRGETISIYYDPGKFPALMPLKNGNYEERNGGVPQRGNITIHLQQFNEDLDKMTPDKNFGGIGVIDFERWKPIFRQNWGNTEIHKKYSIELVRKEHPKWSESMIEAEATKKFEKYARYFMEETLKLAKKTRKRAKWGYYGFPYCYNVTPNNPGPDCDAKATIENDRLSWMYNNQEILFPSVYVRHEQKPEERVYLVQGRIKEAVRISNNLEHSPSVLAYWWYVYQDKMDIYLSETDVEKTFQEIVTNGGDGIIIWGSSSDVNSLSKCKRLREYLLNTLGPFAVNVTETVNGRSSLNF

SEQ ID NO: 407 - protein, 462 aa, Mus musculus
  hyaluronidase
MLGLTQHAQKVWRMKPFSPEVSPGSSPATAGHLLRISTLFLTLLELAQVCRGSVVSNRPFITVWNGDTHWCLTEYGVDVDVSVFDVVANKEQSFQGSNMTIFYREELGTYPYYTPTGEPVFGGLPQNASLVTHLAHTFQDIKAAMPEPDFSGLAVIDWEAWRPRWAFNWDSKDIYRQRSMELVQAEHPDWPETLVEAAAKNQFQEAAEAWMAGTLQLGQVLRPRGLWGYYGFPDCYNNDFLSLNYTGQCPVFVRDQNDQLGWLWNQSYALYPSIYLPAALMGTGKSQMYVRHRVQEALRVAIVSRDPHVPVMPYVQIFYEMTDYLLPLEELEHSLGESAAQGVAGAVLWLSSDKTSTKESCQAIKAYMDSTLGPFIVNVTSAALLCSEALCSGHGRCVRHPSYPEALLTLNPASFSIELTHDGRPPSLKGTLSLKDRAQMAMKFRCRCYRGWRGKWCDKRGM

SEQ ID NO: 408 - protein, 473 aa, Mus musculus
  Hyaluronidase 2
MRAGLGPIITLALVLEVAWAGELKPTAPPIFTGRPFVVAWNVPTQECAPRHKVPLDLRAFDVKATPNEGFFNQNITTFYYDRLGLYPRFDAAGTSVHGGVPQNGSLCAHLPMLKESVERYIQTQEPGGLAVIDWEEWRPVWVRNWQEKDVYRQSSRQLVASRHPDWPSDRVMKQAQYEFEFAARQFMLNTLRYVKAVRPQHLWGFYLFPDCYNHDYVQNWESYTGRCPDVEVARNDQLAWLWAESTALFPSVYLDETLASSVHSRNFVSFRVREALRVAHTHHANHALPVYVFTRPTYTRGLTGLSQVDLISTIGESAALGSAGVIFWGDSEDASSMETCQYLKNYLTQLLVPYIVNVSWATQYCSWTQCHGHGRCVRRNPSANTFLHLNASSFRLVPGHTPSEPQLRPEGQLSEADLNYLQKHFRCQCYLGWGGEQCQRNYKGAAGNASRAWAGSHLTSLLGLVAVALTWTL

SEQ ID NO: 409 - protein, 412 aa, Mus musculus
  hyaluronidase 3
MIMHLGLMMVVGLTLCLMHGQALLQVPEHPFSVVWNVPSARCKAHFGVHLPLDALGIVANHGQHFHGQNISIFYKNQFGLYPYFGPRGTAHNGGIPQAVSLDHHLARAAHQILHSLGSSFAGLAVLDWEEWYPLWAGNWGPHRQVYLAASWVWTQQMFPGLDPQEQLHKAHTSFEQAARALMEYTLQLGRTLRPSGLWGFYRYPACGNGWHKMASNYTGHCHAAITTQNTQLRWLWAASSALFPSIYLPPRLPLAYRQAFVRHRLEEAFRVALLEHSHPLPVLAYSRLTHRSSGRFLSLDDLMQTIGVSAALGTAGVVLWGDLSFSSSEEKCWRLHDYLVGTLGPYVINVTKADMACSHQRCHGHGRCARKDPGQMEAFLHLQPDDSLGAWNSFRCHCYSGWAGPTCLEPKP

SEQ ID NO: 410 - protein, 435 aa, Sus scrofa
  hyaluronidase
MAAHLLPICTLFLNLLSVAQGSRDPVVLNRPFTTIWNANTQWCLKRHGVDVDVSVFEVVVNPGQTFRGPNMTIFYSSQLGTYPYYTSAGEPVFGGLPQNASLDVHLNRTFKDILAAMPESNFSGLAVIDWEAWRPRWAFNWDAKDIYRQRSRALVQKQHPDWPAPWVEAAAQDQFQEAAQTWMAGTLKLGQTLRPHGLWGFYGFPDCYNYDFQSSNYTGQCPPGVSAQNDQLGWLWGQSRALYPSIYLPSALEGTNKTQLYVQHRVNEAFRVAAAAGDPNLPVLPYAQIFHDMTNRLLSREELEHSLGESAAQGAAGVVLWVSWENTRTKESCQSIKEYVDTTLGPFILNVTSGALLCSQAVCSGHGRCVRRPSHTEALPILNPSSFSIKPTPGGGPLTLQGALSLKDRVQMAEEFQCRCYPGWRGTWCEQQGTR

SEQ ID NO: 411 - protein, 419 aa, Sus scrofa
  hyaluronidase 3
MTMQLGLALVLGVAMCLGCGQPLLRAPERPFCVLWNVPSARCKARFGVHLPLEALGITANHGQRFHGQNITIFYKSQLGLYPYFGPRGTAHNGGIPQAVSLDHHLARAAYQIHRSLRPGFTGLAVLDWEEWCPLWAGNWGRRQAYQAASCAWAQRVYPNLDPQEQLCKARAGFEEAARALMEDTLRLGRMLRPHGLWGFYHYPACGNGWHGTASNYTGHCHAAALARNTQLYWLWAASSALFPSIYLPPGLPPAYHQAFVRYRLEEAFRVALVGHPHPLPVLAYARLTHRNSGRFLSQDELVQTIGVSAALGASGVVLWGDLSFSSSEEECWHLRGYLVGTLGPYVINVTRAAMACSHQRCHGHGRCAWQDPGQLKVFLHLHPGGSPGAWESFSCRCYWGWAGPTCQEPRPELGPEEAT

SEQ ID NO: 412 - protein, 449 aa, Rattus norvegicus
  hyaluronidase 1
MKPFSPEVSPDPCPATAAHLLRTYTLFLTLLELAQGCRGSMVSNRPFITVWNADTHWCLKDHGVDVDVSVFDVVANKEQNFQGPNMTIFYREELGTYPYYTPTGEPVFGGLPQNASLVTHLAHAFQDIKAAMPEPDFSGLAVIDWEAWRPRWAFNWDSKDIYQQRSMELVRAEHPDWPETLVEAEAQGQFQEAAEAWMAGTLQLGQVLRPRGLWGYYGFPDCYNYDFLSPNYTGQCSLSIHDQNDQLGWLWNQSYALYPSIYLPAALMGTGKSQMYVRYRVQEAFRLALVSRDPHVPIMPYVQIFYEKTDYLLPLEELEHSLGESAAQGAAGAVLWISSEKTSTKESCQAIKAYMDSTLGPFILNVTSAALLCSEALCSGRGRCVRHPSYPEALLTLSPASFSIEPTHDGRPLSLKGTLSLKDRAQMAMKFKCRCYRGWSGEWCKKQDM

SEQ ID NO: 413 - protein, 473 aa, Rattus norvegicus
  hyaluronidase 2
MRAGLGPIITLALVLEVAWASELKPTAPPIFTGRPFVVAWNVPTQECAPRHKVPLDLRAFDVEATPNEGFFNQNITTFYYDRLGLYPRFDAAGMSVHGGVPQNGSLCAHLPMLKEAVERYIQTQEPAGLAVIDWEEWRPVWVRNWQEKDVYRQSSRQLVASRHPDWPSDRIVKQAQYEFEFAARQFMLNTLRYVKAVRPQHLWGFYLFPDCYNHDYVQNWDSYTGRCPDVEVAQNDQLAWLWAENTALFPSVYLDKTLASSKHSRNFVSFRVQEALRVAHTHHANHALPVYVFTRPTYTRRLTELNQMDLISTIGESAALGSAGVIFWGDSVYASSMENCQNLKKYLTQTLVPYIVNVSWATQYCSWTQCHGHGRCVRRNPSASTFLHLSPSSFRLVPGRTPSEPQLRPEGELSEDDLSYLQMHFRCHCYLGWGGEQCQWNHKRAAGDASRAWAGAHLASLLGLVAMTLTWTL

SEQ ID NO: 414 - protein, 412 aa, Rattus norvegicus
  hyaluronidase 3
MITQLGLTLVVGLTLCLVHVQALLQVPEFPFSVLWNVPSARCKTRFGVHLPLDALGIIANHGQRFHGQNITIFYKNQFGLYPYFGPRGTAHNGGIPQAVSLDHHLAQAAHQILHNLGSSFAGLAVLDWEEWYPLWAGNWGTHRQVYQAASWAWAQQMFPDLNPQEQLHKAQTGFEQAARALMEHTLRLGQMLRPHGLWGFYRYPVCGNGWHNMASNYTGHCHPAIITRNTQLRWLWAASSALFPSIYLPPRLPPAYHQTFVRHRLEEAFRVALTGHAHPLPVLAYVRLTHRSSGRFLSLDDLMQTIGVSAALGAAGVVLWGDLSVSSSEEECWRLHDYLVGTLGPYVINVTKAATACSHQRCHGHGRCSWKDPGQMEAFLHLQPDDNLGAWKSFRCRCYLGWSGPTCLEPKP

SEQ ID NO: 415 - protein, 476 aa, Ovis aries
  hyaluronidase 2
MWTGLGPAVTLALVLVVAWATELKPTAPPIFTGRPFVVAWDVPTQDCGPRHKMPLDPKDMKAFDVQASPNEGFVNQNITIFYRDRLGMYPHFNSVGRSVHGGVPQNGSLWVHLEMLKGHVEHYIRTQEPAGLAVIDWEDWRPVWVRNWQDKDVYRRLSRQLVASHHPDWPPERIVKEAQYEFEFAARQFMLETLRFVKAFRPRHLWGFYLFPDCYNHDYVQNWETYTGRCPDVEVSRNDQLSWLWAESTALFPSVYLEETLASSTHGRNFVSFRVQEALRVADVHHANHALPVYVFTRPTYSRGLTGLSEMDLISTIGESAALGAAGVILWGDAGFTTSNETCRRLKDYLTRSLVPYVVNVSWAAQYCSWAQCHGHGRCVRRDPNAHTFLHLSASSFRLVPSHAPDEPRLRPEGELSWADRNHLQTHFRCQCYLGWGGEQCQWDRRRAAGGASGAWAGSHLTGLLAVAVLAFTWTS

SEQ ID NO: 416 - protein, 414 aa, Pongo pygmaeus
  hyaluronidase 3
MTTRLGPALVLGVALCLGCGQPLPQVPERPFSVLWNVPSAHCKSRFGVHLPLNALGIIANRGQHFHGQNMTIFYKNQLGLYPYFGPKGTAHNGGIPQALPLDRHLALAAYQIHHSLRPGFAGPAVLDWEEWCPLWAGNWGRRRAYQAASWAWAQQVFPDLDPQEQLYKAYTGFEQAARALMEDTLRVAQALRPHGLWGFYHYPACGNGWHSMASNYTGRCHAATLARNTQLHWLWAASSALFPSIYLPPRLPPAHHQAFVRHRLEEAFRVALVGHLPVLAYVRLTHRRSGRFLSQDDLVQTIGVSAALGAAGVVLWGDLSLSSSEEECWHLHDYLVDTLGPYGINVTRAAMACSHQRCHGHGRCARRDPGQMEAFLHLWPDGSLGDWKSFSCHCYWGWAGPTCQEPRLGPKEAV

SEQ ID NO: 417 - protein, 435 aa, Homo sapiens
  Hyaluronidase-1 [Precursor]
MAAHLLPICALFLTLLDMAQGFRGPLLPNRPFTTVWNANTQWCLERHGVDVDVSVFDVVANPGQTFRGPDMTIFYSSQLGTYPYYTPTGEPVFGGLPQNASLIAHLARTFQDILAAIPAPDFSGLAVIDWEAWRPRWAFNWDTKDIYRQRSRALVQAQHPDWPAPQVEAVAQDQFQGAARAWMAGTLQLGRALRPRGLWGFYGFPDCYNYDFLSPNYTGQCPSGIRAQNDQLGWLWGQSRALYPSIYMPAVLEGTGKSQMYVQHRVAEAFRVAVAAGDPNLPVLPYVQIFYDTTNHFLPLDELEHSLGESAAQGAAGVVLWVSWENTRTKESCQAIKEYMDTTLGPFILNVTSGALLCSQALCSGHGRCVRRTSHPKALLLLNPASFSIQLTPGGGPLSLRGALSLEDQAQMAVEFKCRCYPGWQAPWCERKSMW

SEQ ID NO: 418 - protein, 473 aa, Homo sapiens
  Hyaluronidase-2 [Precursor]
MRAGPGPTVTLALVLAVAWAMELKPTAPPIFTGRPFVVAWDVPTQDCGPRLKVPLDLNAFDVQASPNEGFVNQNITIFYRDRLGLYPRFDSAGRSVHGGVPQNVSLWAHRKMLQKRVEHYIRTQESAGLAVIDWEDWRPVWVRNWQDKDVYRRLSRQLVASRHPDWPPDRIVKQAQYEFEFAAQQFMLETLRYVKAVRPRHLWGFYLFPDCYNHDYVQNWESYTGRCPDVEVARNDQLAWLWAESTALFPSVYLDETLASSRHGRNFVSFRVQEALRVARTHHANHALPVYVFTRPTYSRRLTGLSEMDLISTIGESAALGAAGVILWGDAGYTTSTETCQYLKDYLTRLLVPYVVNVSWATQYCSRAQCHGHGRCVRRNPSASTFLHLSTNSFRLVPGHAPGEPQLRPVGELSWADIDHLQTHFRCQCYLGWSGEQCQWDHRQAAGGASEAWAGSHLTSLLALAALAFTWTL

SEQ ID NO: 419 - protein, 417 aa, Homo sapiens
  Hyaluronidase-3 [Precursor]
MTTQLGPALVLGVALCLGCGQPLPQVPERPFSVLWNVPSAHCEARFGVHLPLNALGIIANRGQHFHGQNMTIFYKNQLGLYPYFGPRGTAHNGGIPQALPLDRHLALAAYQIHHSLRPGFAGPAVLDWEEWCPLWAGNWGRRRAYQAASWAWAQQVFPDLDPQEQLYKAYTGFEQAARALMEDTLRVAQALRPHGLWGFYHYPACGNGWHSMASNYTGRCHAATLARNTQLHWLWAASSALFPSIYLPPRLPPAHHQAFVRHRLEEAFRVALVGHRHPLPVLAYVRLTHRRSGRFLSQDDLVQSIGVSAALGAAGVVLWGDLSLSSSEEECWHLHDYLVDTLGPYVINVTRAAMACSHQRCHGHGRCARRDPGQMEAFLHLWPDGSLGDWKSFSCHCYWGWAGPTCQEPRPGPKEAV

SEQ ID NO: 420 - protein, 481 aa, Homo sapiens
  Hyaluronidase-4
MKVLSEGQLKLCVVQPVHLTSWLLIFFILKSISCLKPARLPIYQRKPFIAAWNAPTDQCLIKYNLRLNLKMFPVIGSPLAKARGQNVTIFYVNRLGYYPWYTSQGVPINGGLPQNISLQVHLEKADQDINYYIPAEDFSGLAVIDWEYWRPQWARNWNSKDVYRQKSRKLISDMGKNVSATDIEYLAKVTFEESAKAFMKETIKLGIKSRPKGLWGYYLYPDCHNYNVYAPNYSGSCPEDEVLRNNELSWLWNSSAALYPSIGVWKSLGDSENILRFSKFRVHESMRISTMTSHDYALPVFVYTRLGYRDEPLFFLSKQDLVSTIGESAALGAAGIVIWGDMNLTASKANCTKVKQFVSSDLGSYIANVTRAAEVCSLHLCRNNGRCIRKMWNAPSYLHLNPASYHIEASEDGEFTVKGKASDTDLAVMADTFSCHCYQGYEGADCREIKTADGCSGVSPSPGSLMTLCLLLLASYRSIQL

SEQ ID NO: 421 - protein, 793 aa, Arthrobacter sp
  hyaluronan lyase (strain FB24)
MTREFSRRTALKGAALSGLLLAMVHGPAHAAATANATLTPADFAGLRQRWVDQITGRKVLVAGDNDFVTALAALDKKARTAIDLLERSAGRLTVFSDLSLAKDTDLVTTHTRLATMATAWATPGSEHFADAGLLAAIRAGLADANSLCYNASKEEQGNWWSWEIGTPKALADTMVLLHAELTAAERAAYCAAIDHFVPDPWQQFPPKRGKITSVGANRVDLCQAVTIRSLVDEDAEKLTHAVAGLSEVWQYVSAGNGFFTDGSFIQHSTTPYTGSYGVVLLTGLSKLFALLGGTGAEVSDPSRDILFKTVEGSFAPFMVAGAMADSVRGRSISRESNTGFDLGASTIESILLLARAVDPVTARRWRSLCLAWINQNRKAPILADAGVGRTALVKELLAMGLTETDLPGGHYLFPAMDRTMHHSQGWTLSTAMASSRIAWYECGNGENNRGYHTGSGMTYVYDGDLGQYDDAFWATANHCRLPGITVDTSSLPDKVEGEWGAATPANEWTGSTAYGDVAAVGQHLIGPGGTGLTARKSWFVSKDVIVCLGADIRTGSGSRIETVVDHRNLHAGFNAMGTAAGTVAATPGHPEVLTVDRWVHLEGFGGYVVLDAAPLQVLREQREGSWSEVNVKGSAARQTRNYATLYFDHGHEPEAASYAYLVAPGASASMTSSLSGQSFHTVLRNDEVAQAVKFKKEKTTAATFWRPGTVGDLALSGPACVVVKEVGDRLSIAVSDPTQNASTLTLRLKTKRFFRIIEGQGASLSHGADGFTVLEVDIANHAGRTKQIELSAE

SEQ ID NO: 422 - protein, 557 aa, Bdellovibrio bacteriovorus
  hyaluronan lyase
MTKFFFLLTLISATAFAQSEPDWTAGVPVPPGGRSNIYSWNDFDFQATLNKGKIHAQVYPVTVTGMLPPYEPVRRLIEEKNSNPLRKWIQSLMKGLSGFRSFEDVLKNLGLHKYPLENERGVYAVPYPNEIRPDTLMGFGLIERNGAEGFTFSCAACHSSNLFGKTVLGMTNRFPRANEFFIKAKKVMPLMDPHIFQAYTRATDAETALLVESKERLKSVALKQPIALGLDTSLAQVSLSLNRRAKDGYANYSDKAARSPRADAYLDNKPADSKPAVWWNVKYKNRWLSDGSVLSGNPIFTNLIWNEIGRGADLHELEQWLADNDHIIKELTTAVFASEAPHITDFYPAEKIDLGRAKAGEQIFKNTCAKCHGHYEKAWNLPQALVLSAAERLKTVEVRYKEKTPVVNVGTDPFRRQGMKSLEQLNDLEISKKNGIVIKAQEGYVPPPLVGIWARWPYMHNNSIPNLCVLLTPAKKRPSIYYSGEALNKDTDYDFSCGGYPIGDKTPKAWKTREHLYDTRNPGMGNMGHDEGIFIKDGKEILSAEDKYNLIQFLQTL

SEQ ID NO: 423 - protein, 813 aa, Propionibacterium acnes
  hyaluronan lyase
MFGTPSRRTFLTASALSAMALAASPTVTDAIAAPGPDSWSALCERWIDIITGRRAARTSDPRARAIIAKTDRKVAEILTDLVSGSSRQTVLISADLRKEQSPFITKTARAIESMACAWATPGSSYHKDPEILSACIEGLRDFCRLRYNPSQDEYGNWWDWEDGASRAVADVMCILHDVLPPEVMSAAAAGIDHFIPDPWFQQPASVKPTANPVQPVVSTGANRMDLTRAVMCRSIATGDEKRLRHAVDGLPDAWRVTTEGDGFRADGGFIQHSHIPYTGGYGDVLFSGLAMLFPLVSGMRFDIVESARKAFHDQVERGFIPVMYNGQILDDVRGRSISRINESAAMHGISIARAMLMMADALPTHRAEQWRGIVHGWMARNTFDHLSEPSTLVDISLFDAAAKARPVPESSTPSYFASMDRLVHRTADWLITVSNCSDRIAWYEYGNGENEWASRTSQGMRYLLLPGDMGQYEDGYWATVDYSAPTGTTVDSTPLKRAVGASWAAKTPTNEWSGGLASGSWSAAASHITSQDSALKARRLWVGLKDAMVELTTDVTTDASRAITVVEHRKVASSSTKLLVDGNRVSSATSFQNPRWAHLDGVGGYVFATDTDLSADVATRKGTWIDVNPSRKVKGADEVIERAYASLHVTHHDRPVAWALLPTASRSHTMALATRPGVEPFTVLRNDATVQAVRSAGALLTKDPTVVTTLAFWKPATCGGVAVNRPALVQTRESANQMEVVIVEPTQKRGSLTVTIEGSWKVKTADSHVDVSCENAAGTLHVDTAGLGGQSVRVTLARQVTQTPSGGGRHDRA

SEQ ID NO: 424 - protein, 1072 aa, Streptococcus agalactiae
  hyaluronan lyase
MEIKKKYRIMLYSALILGTILVNNSYQAKAEELTKTTSTSQIRDTQTNNIEVLQTESTTVKETSTTTTQQDLSNPTASTATATATHSTMKQVVDNQTQNKELVKNGDFNQTNPVSGSWSHTSAREWSAWIDKENTADKSPIIQRTEQGQVSLSSDKGFRGAVTQKVNIDPTKKYEVKFDIETSNKAGQAFLRIMEKKDNNTRLWLSEMTSGTTNKHTLTKIYNPKLNVSEVTLELYYEKGTGSATFDNISMKAKGPKDSEHPQPVTTQIEESVNTALNKNYVFNKADYQYTLTNPSLGKIVGGILYPNATGSTTVKISDKSGKIIKEVPLSVTASTEDKFTKLLDKWNDVTIGNHVYDTNDSNMQKINQKLDETNAKNIKTIKLDSNHTFLWKDLDNLNNSAQLTATYRRLEDLAKQITNPHSTIYKNEKAIRTVKESLAWLHQNFYNVNKDIEGSANWWDFEIGVPRSITATLALMNNYFTDAEIKTYTDPIEHFVPDAGYFRKTLDNPFKALGGNLVDMGRVKIIEGLLRKDNTIIEKTSHSLKNLFTTATKAEGFYADGSYIDHTNVAYTGAYGNVLIDGLTQLLPIIQETDYKISNQELDMVYKWINQSFLPLIVKGELMDMSRGRSISREAASSHAAAVEVLRGFLRLANMSNEERNLDLKSTIKTIITSNKFYNVFNNLKSYSDIANMNKMLNDSTVATKPLKSNLSTFNSMDRLAYYNAEKDFGFALSLHSKRTLNYEGMNDENTRGWYTGDGMFYLYNSDQSHYSNHFWPTVNPYKMAGTTEKDAKREDTTKEFMSKHSKDAKEKTGQVTGTSDFVGSVKLNDHFALAAMDFTNWDRTLTAQKGWVILNDKIVFLGSNIKNTNGIGNVSTTIDQRKDDSKTPYTTYVNGKTIDLKQASSQQFTDTKSVFLESKEPGRNIGYIFFKNSTIDIERKEQTGTWNSINRTSKNTSIVSNPFITISQKHDNKGDSYGYMMVPNIDRTSFDKLANSKEVELLENSSKQQVIYDKNSQTWAVIKHDNQESLINNQFKMNKAGLYLVQKVGNDYQNVYYQPQTMTKTDQLAI

SEQ ID NO: 425 - protein, 1072 aa, Streptococcus agalactiae 18RS21
  hyaluronan lyase
MEIKKKHRIMLYSALILGTILVNNSYQAKAEELTKTTSTSQIRDTQTNNIEVLQTESTTVKETSTTTTQQDLSNPTASTATATATHSTMKQVVDNQTQNKELVKNGDFNQTNPVSGSWSHTSAREWSAWIDKENTADKSPIIQRTEQGQVSLSSDKGFRGAVTQKVNIDPTKKYEVKFDIETSNKAGQAFLRIMEKKDNNTRLWLSEMTSGTTNKHTLTKIYNPKLNVSEVTLELYYEKGTGSATFDNISMKAKGPKDSEHPQPVTTQIEESVNTALNKNYVFNKADYQYTLTNPSLGKIVGGILYPNATGSTTVKISDKSGKIIKEVPLSVTASTEDKFTKLLDKWNDVTIGNHVYDTNDSNMQKINQKLDETNAKNIKTIKLDSNHTFLWKDLDNLNNSAQLTATYRRLEDLAKQITNPHSTIYKNEKAIRTVKESLAWLHQNFYNVNKDIEGSANWWDFEIGVPRSITATLALMNNYFTDAEIKTYTDPIEHFVPDAGYFRKTLDNPFKALGGNLVDMGRVKIIEGLLRKDNTIIEKTSHSLKNLFTTATKAEGFYADGSYIDHTNVAYTGAYGNVLIDGLTQLLPIIQETDYKISNQELDMVYKWINQSFLPLIVKGELMDMSRGRSISREAASSHAAAVEVLRGFLRLANMSNEERNLDLISTIKTIITSNKFYNVFNNLKSYSDIANMNKMLNDSTVATKPLKSNLSTFNSMDRLAYYNAEKDFGFALSLHSKRTLNYEGMNDENTRGWYTGDGMFYLYNSDQSHYSNHFWPTVNPYKMAGTTEKDAKREDTTKEFMSKHSKDAKEKTGQVTGTSDFVGSVKLNDHFALAAMDFTNWDRTLTAQKGWVILNDKIVFLGSNIKNTNGIGNVSTTIDQRKDDSKTPYTTYVNGKTIDLKQASSQQFTDTKSVFLESKEPGRNIGYIFFKNSTIDIERKEQTGTWNSINRTSKNTSIVSNPFITISQKHDNKGDSYGYMMVPNIDRTSFDKLANSKEVELLENSSKQQVIYDKNSQTWAVIKHDNQESLINNQFKMNKAGLYLVQKVGNDYQNVYYQPQTMTKTDQLAI

SEQ ID NO: 426 - protein, 1081 aa, Streptococcus agalactiae serotype Ia
  hyaluronan lyase
MEIKKKHRIMLYSALILGTILVNNSYQAKAEEFTKTTSTSQIRDTQTNNVEVPQTESTTVKGTSTTTTQQDLSNSTASTATATATHSTMKQVVDNQTQNKELVKNGDFKEKIIDKKIDKKSQWTNLYGAKDWNTYIDQTKSVNKSPIIQRTEQGQVSLSSDKGFRGAVTQKVNIDPTKKYEVKFDIETSNKVGQAFLRIMKKKDKNTRLWLSEMTSGTTNKHTLTKIYNPKLNVSEVTLELYYEKGTGSVTFDNISMKAKGPKDSEHPQPVTTQIEESVNTALNKNYVFNKADYQYTLTNPSLGKIVGGILYPSATGSTTVKISDKSGKIIKEVPLSVTASTEDNFTKLLDKWNDVTIGNHVYDTNDSNMQKLNQKLDETNAKNIKDIKLDSNRTFLWEDLKGLNNSAQLTATYRRLEDLAKQITNPHSTIYKNEKAIRTVKESLAWLHQNFYNVNKDIEGSANWWDFEIGVPRSITATLALMNNYFTDAEIKTYTDPIEHFVPDAGYFRKTLVNPFKALGGNLVDMGRVKIIEGLLRKDNTIIKKTSHSLKNLFTTATKAEGFYADGSYIDHTNVAYTGAYGNVLIDGLTQLLPIIQETDYKISNQELDMVYKWINQSFLPLIVKGELMDMSRGRSISREAASSHAAAVEVLRGFLRLANMSNEERNLDLKSTIKTIITSNKFYNVFNNLKSYSDIANMNKLLNDSTVATKPLKSNLSTFNSMDRLAYYNAEKDFGFALSLHSKRTLNYEGMNDENTRGWYTGDGMFYLYNSDQSHYSNHFWPTVNPYKMAGTTEKDTGREDTIKKLMNRYDKTNKNSKVMTGQVTGTSDFVGSVKLNDHFALAAMDFTNWDRTLTAQKGWVILNDKIVFLGSNIKNTNGVGNVSTTIDQRKDDSKTPYTTYVNGKTVDLKQASSQQFTDTKSVFLESKEPGRNIGYIFFKNSTIDIERKEQTGTWNSINRTSKNTSIVSNPFITISQKHDNKGDSYGYMMVPNIDRTSFDKLANSKEVELLENSSKQQVIYDKNSQTWAVIKHDNQESLINNQFKMNKAGLYLVQKVGNDYQNVYYQPQTMTKTDQLAI

SEQ ID NO: 427 - protein, 984 aa, Streptococcus agalactiae serotype III
  hyaluronan lyase
MKQVVDNQTQNKELVKNGDFNQTNPVSGSWSHTSAREWSAWIDKENTADKSPIIQRTEQGQVSLSSDKGFRGAVTQKVNIDPTKKYEVKFDIETSNKAGQAFLRIMEKKDNNTRLWLSEMTSGTTNKHTLTKIYNPKLNVSEVTLELYYEKGTGSATFDNISMKAKGPKDSEHPQPVTTQIEESVNTALNKNYVFNKADYQYTLTNPSLGKIVGGILYPNATGSTTVKISDKSGKIIKEVPLSVTASTEDKFTKLLDKWNDVTIGNHVYDTNDSNMQKINQKLDETNAKNIKTIKLDSNHTFLWKDLDNLNNSAQLTATYRRLEDLAKQITNPHSTIYKNEKAIRTVKESLAWLHQNFYNVNKDIEGSANWWDFEIGVPRSITATLALMNNYFTDAEIKTYTDPIEHFVPDAGYFRKTLDNPFKALGGNLVDMGRVKIIEGLLRKDNTIIEKTSHSLKNLFTTATKAEGFYADGSYIDHTNVAYTGAYGNVLIDGLTQLLPIIQETDYKISNQELDMVYKWINQSFLPLIVKGELMDMSRGRSISREAASSHAAAVEVLRGFLRLANMSNEERNLDLKSTIKTIITSNKFYNVFNNLKSYSDIANMNKMLNDSTVATKPLKSNLSTFNSMDRLAYYNAEKDFGFALSLHSKRTLNYEGMNDENTRDWYTGDGMFYLYNSDQSHYSNHFWPTVNPYKMAGTTEKDAKREDTTKEFMSKHSKDAKEKTGQVTGTSDFVGSVKLNDHFALAAMDFTNWDRTLTAQKGWVILNDKIVFLGSNIKNTNGIGNVSTTIDQRKDDSKTPYTTYVNGKTIDLKQASSQQFTDTKSVFLESKEPGRNIGYIFFKNSTIDIERKEQTGTWNSINRTSKNTSIVSNPFITISQKHDNKGDSYGYMMVPNIDRTSFDKLANSKEVELLENSSKQQVIYDKNSQTWAVIKHDNQESLINNQFKMNKAGLYLVQKVGNDYQNVYYQPQTMTKTDQLAI

SEQ ID NO: 428 - protein, 807 aa, Staphylococcus aureus (strain COL)
  hyaluronan lyase
MTYRIKKWQKLSTITLLMAGVITLNGGEFRSVDKHQIAVADTNVQTPDYEKLRNTWLDVNYGYDKYDENNPDMKKKFDATEKEATNLLKEMKTESGRKYLWSGAETLETNSSHMTRTYRNIEKIAEAMRNPKTTLNTDENKKKVKDALEWLHKNAYGKEPDKKVKELSENFTKTTGKNTNLNWWDYEIGTPKSLTNTLILLNDQFSNEEKKKFTAPIKTFAPDSDKILSSVGKAELAKGGNLVDISKVKLLECIIEEDKDMMKKSIDSFNKVFTYVQDSATGKERNGFYKDGSYIDHQDVPYTGAYGVVLLEGISQMMPMIKETPFNDKTQNDTTLKSWIDDGFMPLIYKGEMMDLSRGRAISRENETSHSASATVMKSLLRLSDAMDDSTKAKYKKIVKSSVESDSSYKQNDYLNSYSDIDKMKSLMTDNSISKNGLTQQLKIYNDMDRVTYHNKDLDFAFGLSMTSKNVARYESINGENLKGWHTGAGMSYLYNSDVKHYHDNFWVTADMKRLSGTTTLDNEILKDTDDKKSSKTFVGGTKVDDQHASIGMDFENQDKTLTAKKSYFILNDKIVFLGTGIKSTDSSKNPVTTIENRKANGYTLYTDDKQTTNSDNQENNSVFLESTDTKKNIGYHFLNKPKITVKKESHTGKWKEINKSQKDTQKTDEYYEVTQKHSNSDNKYGYVLYPGLSKDVFKTKKDEVTVVKQEDDFHVVKDNESVWAGVNYSNSTQTFDINNTKVEVKAKGMFILKKKDDNTYECSFYNPESTNSASDIESKISMTGYSITNKNTSTSNESGVHFELTK

SEQ ID NO: 429 - protein, 420 aa, Staphylococcus aureus (strain MRSA252)
  hyaluronan lyase
MTYRMKKWQKLSTITLLMAGVITLNGGEFRSIDKHQIAVADTNVQTTDYEKLRNIWLDVNYGYDKYDENNPDMKKKFEATENEAEKLLKEMKTESDRKYLWESSKDLDTKSADMTRTYRNIEKISEAMKHKNTKLKTDENKTKVKDALEWLHKNAYGKEPDKKVADLTSNFKNKTSRNTNLNWWDYEIGTPRALTNTLILLQEDFTDEEKKKYTAPIKTFAPDSDKILSSVGKSEPAKGGNLVDISKVKLLESIIEEDKDMMKKSIDSFNTVFTYAQNSATGKERNGFYKDGSYIDHQDVPYTGAYGVVLLEGISQMMPMIKETPFNDSNQNDTTLKSWIDDGFMPLIYKGEMMDLSRGRAISRENETSHSASATVMKSLLRLSDTMDKSTKAKYKKIVKTSVESDSSYKQTDYLSSYSD

SEQ ID NO: 430 - protein, 806 aa, Staphylococcus aureus (strain MRSA252)
  hyaluronan lyase
MTNKMKKWQKLSTITLLMTGVIALNNGEFRNVDKHQIAVADTNVQTPDYEKLKKTWLDVNYGYDQYDENNQDMKKKFDAKEKEAKKLLDDMKTDTNRTYLWSGAENLETNSSHMTKTYRNIEKIAESMQHKNTVLKTVENKLKIKEALDWMHKNVYGKNPSQKVEDLTKNRKGQTTPKNNSLNWWDYEIGTPRALTNTLLLMDDMLTKDEMKNYSKPISTYAPSSDKILSSVGESEDAKGGNLVDISKVKLLESVIEEDVDMLKKSIDSFNKVFTYVQDSATGKGRNGFYKDGSYIDHQDVPYTGAYGVVLLEGISQMMPMIKESPFKTTQDNATLSNWIDEGFMPLIYKGEMMDLSRGRAISRENETSHTASATVMKSLLRLNDTMDDSTKTRYKQIVKTSVNSDSSYNQNNYLNSYSDIAKMKKLMNDSTISKNDLTQQLKIYNDMDRVTYHNKDLDFAFGLSMTSKNIARYENINGENLKGWHTGAGMSYLYNSDVKHYRDNFWATADMTCLPGTTTLNDMPSTNTKNDKSFVGGTKLNNKYASIGMDFENQDKTLTAKKSYFILNDKIVFLGTGIKSTDSSKNPVTSVENRKANGYKLFKDDIEITTSDVNAQETHSVFLESNDTKKNIGYHFLDKPKITVKKESHTGKWSEINKSQKKDDKKDEYYEVTQTHNTSDSKYAYVLYPGLSKSDFKSKNNNVSIVKQDEDFHVIKDNDGVFAGVNYSDNTKSFDINGITVELKEKGMFVIKKKDDKAYKCSFYNPETTNTASNIESKIFIKGYTITNKSVINSNDAGVNFELTK

SEQ ID NO: 431 - protein, 815 aa, Staphylococcus aureus (strain MSSA476)
  hyaluronan lyase
MTYRIKKWQKLSTITLLMAGVITLNGGEFRSIDKYQIAVADTNVQTPDYEKLRNTWLDVNYGYDKYDEKNDAMKKKFEATENEAKKLLSEMKTESDRKYLWENSKDLDTKSADMTRTYRNIEKIAEAMKHKDTKLKIDENKKKVKDALEWLHKNAYGKEPDKKVADLTSNFKNKTSRNTNLNWWDYEIGTPRALTNTLILLNDQFSNDEKKKYTAPIKTFAPESDKILSSVGQPEQAKGGNLVDIAKVKLLESIIEEDKDITKNSIDAFNKVFTYVQSNATGKERNGFYKDGSYIDHQDVPYTGAYGVVLLEGISQMMPMIKETPFNDKTQNDTTLKSWIDDGFMPLIYKGEMMDLSRGRAISRENETSHTASATVMKSLLRLSDAMDDSTKAKYKQIVKTSVKSDSSYGQNDTLSSYSDISKMKSLMEDSTISTNGLTQQLKIYNDMDRVTYHNKDLDFAFGLSMTSKNVARYESINGENLKGWHTGAGMSYLYNSDVKHYRDNFWATADMKRLAGTTTLENEEPKGTDVKKSSKTFVGGTKFDDQHASIGMDFENQDKTLTAKKSYFILNDKIVFLGTGIKSTDSSKNPVTTIENRKANGYTLYTDDKQTTASDNQGTNSVFLESTNKPKNNIGYHFLNESKITVKKESHTGKWSDINKSQKQDSKTNQYYEVTQKHSNTDSKYAYVLYPGLSKDDFNTKKDKVTVVKQDDDFHVVKDNESVWAGVNYSDSTQTFIINNTKVEVKAKGMFILKKKDDKTYECSFYNPESTNTASDIESKISMTGYSITNKNTSTSNESGVRFELQQTLNKDDN

SEQ ID NO: 432 - protein, 807 aa, Staphylococcus aureus (strain NCTC 8325); identical to SEQ ID NO: 428
  hyaluronan lyase

SEQ ID NO: 433 - protein, 809 aa, Staphylococcus aureus (strain bovine RF122)
  hyaluronan lyase
MTYRMKKWQKLSTITLLMAGGITFNDSEFRSVDKHQIAVADTNVQTPNYEKLKNTWLDVNYGYDKYDESNPDMKKKFEATEKEARKLLSEMKTESDRKYLWENSKDLDTKSADMTRTYRNIEKIAEAMKHPKTTLKNDENKKKVKDALEWLHKNAYGKEPGKKVADLKTNFSKSAPQKNTNLNWWDYEIGTPRALTNTLILLKEDFTDEEKKKYTAPIKTFAPKSDEILSSVGKAEPAKGGNLVDISKVKLLESIIEEDKDMMKNSIDSFNKVFTYVQDSATDKERNGFYKDGSYIDHKDVPYTGAYGVVLLEGISQMMPMIKETPFNDKTQNNTTLTSWIDDGFMPLIYKGEMMDLSRGRAISRENETSHSASATVMKSLLRLSDAMDESTKAKYKQIVKNSVKSDSSYGQNDTLSSYSDIDKMKSLMTDSTISTNGLTQQLKIYNAMDRVTYHNKDLDFAFGLSMTSKNVARYENINGENLKGWHTGAGMSYLYNSDVRHYRDNFWATADMKRLADTTTLENEEPKGTDVKKSSKTFVGGTKFDDQHASIGMDFENQDKTLTAKKSYFILNDKIVFLGTGIKTTDSSKNPVTTIENRKAHGYTLYTDDKQTTNSNNQETNSVFLESTNSTQNNIGYHFLNKSKITVKKESHTGKWSDINKSQKDTQKTDEYYEVTQKHSNTDDKYAYVLYPGITKDNFKSKASQVTVVKQDDDFHVVKDNESVWAGVNYSDSTQTFDINGTKVEVKAKGMFILKKKDDNTYECSFYNPESTNSASDIESKISMTGYSITNKNTSNTNESGVRFELTK

SEQ ID NO: 434 - protein, 807 aa, Staphylococcus aureus (strain bovine RF122)
  hyaluronan lyase
MTYKMKKWQKLSTITLLMAGVITLNNGEFRNVDKHQIAVADTNVQTPDYEKLKKTWLDVNYGNDQYDENNQDMKKKFDAKENEAKKLLEDMKTDTNRTYLWSGAENLETNSSHMTKTYRNIEKIAEAMRHKNTSLKTDENKLKIKDAIKWLHHNVYGKDPDKKVADLTTNRKEKDSSKKNNSLNWWDYEIGTPRALTNTLLLMDNMLTKDEMKNYSKPISIYSPSSYKILSSVGESEDAKGGNLVDIAKVKFLESVIEEDVDMMKKSIDSFNKVFTYVQDSATGKARNGFYKDGSYIDHQDVPYTGAYGVVLLEGISQMMPMIKESPFKHTQDKATLSNWIDEGFMPLIYKGEMMDLSRGRAISRENETSHTASATVMKSLLRLSDTMDESTKTKYKQIVKTSVKSDSSYDSNDTLNSYSDIDKMKKLMNDSTISKNDLTQQLKIYNDMDRVTYHNKELDFAFGLSMTSKNIARYENINGENLKGWHTGAGMSYLYNSDVKHYRDNFWATADMTRLPGTTTLNDMPSTNTKNDKSFVGGTKLNNKYASIGMDFENQDKTLTAKKSYFILNDKIVFIGTGIKSTDSSKNPVTSVENRKANGYKLFKGDIEITTSDVNAQETHSVFLESNDTKKNIGYHFLDKPKITVKKESHTGKWSEINKSQKTDDKKDEYYEVTQTHNTSDSKYAYVLYPGLSKSDFKSKNNNVSIVKQDEDFHVIKDNDGVFAGVNYSDSTKSFDINGTIVELKEKGMFVIKKKDDNTYECSFYNPTSTNSTSNKESKISVTGYTITNQSVSNFKESDIHFELTK

SEQ ID NO: 435 - protein, 807 aa, Staphylococcus aureus (strain USA300); identical to SEQ ID NO: 428
  hyaluronan lyase

SEQ ID NO: 436 - protein, 1066 aa, Streptococcus pneumoniae
  hyaluronan lyase
MQTKTKKLIVSLSSLVLSGFLLNHYMTIGAEETTTNTIQQSQKEVQYQQRDTKNLVENGDFGQTEDGSSPWTGSKAQGWSAWVDQKNSADASTRVIEAKDGAITISSHEKLRAALHRMVPIEAKKKYKLRFKIKTDNKIGIAKVRIIEESGKDKRLWNSATTSGTKDWQTIEADYSPTLDVDKIKLELFYETGTGTVSFKDIELVEVADQLSEDSQTDKQLEEKIDLPIGKKHVFSLADYTYKVENPDVASVKNGILEPLKEGTTNVIVSKDGKEVKKIPLKILASVKDAYTDRLDDWNGIIAGNQYYDSKNEQMAKLNQELEGKVADSLSSISSQADRTYLWEKFSNYKTSANLTATYRKLEEMAKQVTNPSSRYYQDETVVRTVRDSMEWMHKHVYNSEKSIVGNWWDYEIGTPRAINNTLSLMKEYFSDEEIKKYTDVIEKFVPDPEHFRKTTDNPFKALGGNLVDMGRVKVIAGLLRKDDQEISSTIRSIEQVFKLVDQGEGFYQDGSYIDHTNVAYTGAYGNVLIDGLSQLLPVIQKTKNPIDKDKMQTMYHWIDKSFAPLLVNGELMDMSRGRSISRANSEGHVAAVEVLRGIHRIADMSEGETKQCLQSLVKTIVQSDSYYDVFKNLKTYKDISLMQSLLSDAGVASVPRPSYLSAFNKMDKTAMYNAEKGFGFGLSLFSSRTLNYEHMNKENKRGWYTSDGMFYLYNGDLSHYSDGYWPTVNPYKMPGTTETDAKRADSDTGKVLPSAFVGTSKLDDANATATMDFTNWNQTLTAHKSWFMLKDKIAFLGSNIQNTSTDTAATTIDQRKLESGNPYKVYVNDKEASLTEQEKDYPETQSVFLESFDSKKNIGYFFFKKSSISMSKALQKGAWKDINEGQSDKEVENEFLTISQAHKQNRDSYGYMLIPNVDRATFNQMIKELESSLIENNETLQSVYDAKQGVWGIVKYDDSVSTISNQFQVLKRGVYTIRKEGDEYKIAYYNPETQESAPDQEVFKKLEQAAQPQVQNSKEKEKSEEEKNHSDQKNLPQTGEGQSILASLGFLLLGAFYLFRRGKNN

SEQ ID NO: 437 - protein, 1078 aa, Streptococcus pneumoniae (strain ATCC BAA-255/R6)
  hyaluronan lyase
MILQYVYWSVYMQTKTKKLIVSLSSLVLSGFLLNHYMTVGAEETTTNTIQQSQKEVQYQQRDTKNLVENGDFGQTEDGSSPWTGSKAQGWSAWVDQKNSSADASTRVIEAKDGAITISSPEKLRAAVHRMVPIEAKKKYKLRFKIKTDNKVGIAKVRIIEESGKDKRLWNSATTSGTKDWQTIEADYSPTLDVDKIKLELFYETGTGTVSFKDIELVEVADQPSEDSQTDKQLEEKIDLPIGKKHVFSLADYTYKVENPDVASVKNGILEPLKEGTTNVIVSKDGKEVKKIPLKILASVKDTYTDRLDDWNGIIAGNQYYDSKNEQMAKLNQELEGKVADSLSSISSQADRIYLWEKFSNYKTSANLTATYRKLEEMAKQVTNPSSRYYQDETVVRTVRDSMEWMHKHVYNSEKSIVGNWWDYEIGTPRAINNTLSLMKEYFSDEEIKKYTDVIEKFVPDPEHFRKTTDNPFKALGGNLVDMGRVKVIAGLLRKDDQEISSTIRSIEQVFKLVDQGEGFYQDGSYIDHTNVAYTGAYGNVLIDGLSQLLPVIQKTKNPIDKDKMQTMYHWIDKSFAPLLVNGELMDMSRGRSISRANSEGHVAAVEVLRGIHRIADMSEGETKQRLQSLVKTIVQSDSYYDVFKNLKTYKDISLMQSLLSDAGVASVPRTSYLSAFNKMDKTAMYNAEKGFGFGLSLFSSRTLNYEHMNKENKRGWYTSDGMFYLYNGDLSHYSDGYWPTVNPYKMPGTTETDAKRADSDTGKVLPSAFVGTSKLDDANATATMDFTNWNQTLTAHKSWFMLKDKIAFLGSNIQNTSTDTAATTIDQRKLESSNPYKVYVNDKEASLTEQEKDYPETQSVFLESSDSKKNIGYFFFKKSSISMSKALQKGAWKDINEGQSDKEVENEFLTISQAHKQNGDSYGYMLIPNVDRATFNQMIKELESSLIENNETLQSVYDAKQGVWGIVKYDDSVSTISNQFQVLKRGVYTIRKEGDEYKIAYYNPETQESAPDQEVFKKLEQAAQPQVQNSKEKEKSEEEKNHSDQKNLPQTGEGQSILASLGFLLLGAFYLFRRGKNN

SEQ ID NO: 438 - protein, 1067 aa, Streptococcus pneumoniae serotype 2 (strain D39/N)
  hyaluronan lyase
MQTKTKKLIVSLSSLVLSGFLLNHYMTVGAEETTTNTIQQSQKEVQYQQRDTKNLVENGDFGQTEDGSSPWTGSKAQGWSAWVDQKNSSADASTRVIEAKDGAITISSPEKLRAAVHRMVPIEAKKKYKLRFKIKTDNKVGIAKVRIIEESGKDKRLWNSATTSGTKDWQTIEADYSPTLDVDKIKLELFYETGTGTVSFKDIELVEVADQPSEDSQTDKQLEEKIDLPIGKKHVFSLADYTYKVENPDVASVKNGILEPLKEGTTNVIVSKDGKEVKKIPLKILASVKDTYTDRLDDWNGIIAGNQYYDSKNEQMAKLNQELEGKVADSLSSISSQADRIYLWEKFSNYKTSANLTATYRKLEEMAKQVTNPSSRYYQDETVVRTVRDSMEWMHKHVYNSEKSIVGNWWDYEIGTPRAINNTLSLMKEYFSDEEIKKYTDVIEKFVPDPEHFRKTTDNPFKALGGNLVDMGRVKVIAGLLRKDDQEISSTIRSIEQVFKLVDQGEGFYQDGSYIDHTNVAYTGAYGNVLIDGLSQLLPVIQKTKNPIDKDKMQTMYHWIDKSFAPLLVNGELMDMSRGRSISRANSEGHVAAVEVLRGIHRIADMSEGETKQRLQSLVKTIVQSDSYYDVFKNLKTYKDISLMQSLLSDAGVASVPRTSYLSAFNKMDKTAMYNAEKGFGFGLSLFSSRTLNYEHMNKENKRGWYTSDGMFYLYNGDLSHYSDGYWPTVNPYKMPGTTETDAKRADSDTGKVLPSAFVGTSKLDDANATATMDFTNWNQTLTAHKSWFMLKDKIAFLGSNIQNTSTDTAATTIDQRKLESSNPYKVYVNDKEASLTEQEKDYPETQSVFLESSDSKKNIGYFFFKKSSISMSKALQKGAWKDINEGQSDKEVENEFLTISQAHKQNGDSYGYMLIPNVDRATFNQMIKELESSLIENNETLQSVYDAKQGVWGIVKYDDSVSTISNQFQVLKRGVYTIRKEGDEYKIAYYNPETQESAPDQEVFKKLEQAAQPQVQNSKEKEKSEEEKNHSDQKNLPQTGEGQSILASLGFLLLGAFYLFRRGKNN

SEQ ID NO: 439 - protein, 805 aa, Streptococcus pyogenes serotype M1
  hyaluronan lyase
MNTYFCTHHKQLLLYSNLFLSFAMMGQGTAIYADTLTSNSEPNNTYFQTQTLTTTDSEKKVVQPQQKDYYTELLDQWNSIIAGNDAYDKTNPDMVTFHNKAEKDAQNIIKSYQGPDHENRTYLWEHAKDYSASANITKTYRNIEKIAKQITNPESCYYQDSKAIAIVKDGMAFMYEHAYNLDRENHQTTGKENKENWWVYEIGTPRAINNTLSLMYPYFTQEEILKYTAPIEKFVPDPTRFRVRAANFSPFEANSGNLIDMGRVKLISGILRKDDLEISDTIKAIEKVFTLVDEGNGFYQDGSLIDHVVTNAQSPLYKKGIAYTGAYGNVLIDGLSQLIPIIQKTKSPIKADKMATIYHWINHSFFPIIVRGEMMDMTRGRSISRFNAQSHVAGIEALRAILRIADMSEEPHRLALKTRIKTLVTQGNAFYNVYDNLKTYHDIKLMKELLSDTSVPVQKLDSYVASFNSMDKLALYNNKHDFAFGLSMFSNRTQNYEAMNNENLHGWFTSDGMFYLYNNDLGHYSENYWATVNPYRLPGTTETEQKPLEGTPENIKTNYQQVGMTGLSDDAFVASKKLNNTSALAAMTFTNWNKSLTLNKGWFILGNKIIFVGSNIKNQSSHKAYTTIEQRKENQKYPYCSYVNNQPVDLNNQLVDFTNTKSIFLESDDPAQNIGYYFFKPTTLSISKALQTGKWQNIKADDKSPEAIKEVSNTFITIMQNHTQDGDRYAYMMLPNMTRQEFETYISKLDIDLLENNDKLAAVYDHDSQQMHVIHYGKKATMFSNHNLSHQGFYSFPHPVRQNQQ

SEQ ID NO: 440 - protein, 780 aa, Streptococcus pyogenes serotype M2 (strain MGAS10)
  hyaluronan lyase
MVYFYLVNQSTFIISFLYWRNVSVNTYFCTHHKQLLLYSNLFLSFAMIGQGTAIYADTLTSNSEPNNTYFQTQTLTTTDSEKKVVQPQQKDYYTELLDQWNSIIAGNDAYDKTNPDMVTFHNKAEKDAQNIIKSYQGPDHENRTYLWEHAKDYSASTNITKTYRNIEKIAKQITNPESCYYQDSKAIAIVKDGMAFMYEHAYNLNRENHQTTGKENKENWWVYEIGTPRAINNTLSLMYPYFTQEEILKYTAPIEKFVPDPTRFRVRAANFSPFEANSGNLIDMGRVKLISGILRKDDLEISDTIKAIEKVFTLVDEGNGFYQDGSLIDHVVTNTQSPLYKKGIAYTGAYGNVLIDGLSQLIPIIQKTKSPIEADKMATIYHWINHSFFPIIVRGEMMDMTRGRSISRFNAQSHVAGIEALRAILRIADMSEEPHRLELKTRIKTLVTQGNAFYNVYDNLKTYHDIKLMKELLSDTSVPVQKLDSYVASFNSMDKLALYNNKHDFAFGLSMFSNRTQNYEAMNNENLHGWFTSDGMFYLYNNDLGHYSENYWATVNPYRLPGTTETEQKPLEGTPENIKTNYQQVGMTSLSDDAFVASKKLNNTSALAAMTFTNWNKSLTLNKGWFILGNKIIFVGSNIKNQSSHKAYTTIEQRKENQKHPYCSYVNNQPVDLNNQLVDFTNTKSIFLESDDPAQNIGYYFFKPRTLSISKALQTGKWQNIKADDKSPEAIKEVSNTFITIMQNHTQEGDRYAYMMLPNMTRQEFETYISKLDIDLLENN

SEQ ID NO: 441 - protein, 868 aa, Streptococcus pyogenes serotype M4 (strain MGAS10)
  hyaluronan lyase
MNTYFCTHHKQLLLYSNLFLSFAMMGQGTAIYADTLTSNSKPNNTYFQTQTLTTTDSEKKVVQPQQKDYYTELLDQWNSIIAGNDAYDKTNPDMVTFHNKAEKDAQNIIKSYQEPDHENRTYLWEHAKDYSASANITKTYRNIEKIAKQITNPESCYYQDSKAIAIVKDGMAFMYEHAYNLDRENHQTTGKENKENWWDYEIGTPRAINNTLSLMYPYFTQEEILKYTAPIEKFVPDPTRFRVRAANFPPFEANSGNLIDMGRVKLISGILRKDDLEISDTIKAIEKVFTLVDEGNGFYQDGSLIDHVVTNAQSPLYKKGIAYTGAYGNVLIDGLSQLIPIIQKTKSPIEADKMATIYHWINHSFFPIIVRGEMMDMTRGRSISRFNAQSHVAGIEALRAILRIADMSEEPHRLALKTRIKTLVTQGNVFYNVYDNLKTYHDIKLMKELLSDTSVPVQKLDSYVASFNSMDKLALYNNKHDFAFGLSMFSNRTQNYEAMNNENLHGWFTSDGMFYLYNNDLGHYSENYWATVNPYRLPGTTETEQKPLEGTPENIKTNYQQVGMTSLSDDAFVASKKLNNTSALAAMTFTNWNKSLTLNKGWFILGNKIIFVGSNIKNQSSHKAYTTIEQRKENQKHPYCSYVNNQPVDLNNQLVDFTNTKSIFLESDDPAQNIGYYFFKPTTLSISKALQTGKWQNIKADDKSPEAIKEVSNTFITIMQNHTQDGDRYAYMMLPNMTRQEFETYISKLDIDLLENNDKLAAVYDHDSQQMHVIHYEKKATTFSNHNLSHQGFYSFPHPVKQNQQQKLAHQGIAAKNNALNSHKIPHKRQRRLPRTGYQSSSLEFLGGALVASFNHITKPFRKKDLRI

SEQ ID NO: 442 - protein, 828 aa, Streptococcus pyogenes serotype M6
  hyaluronan lyase
MVYFYLVDQFTFIISFLYWRNLSVNTYFCTHHKQLLLYSNLFLSFAMMGQGTAIYADTLTSNSEPNNTYFQTQTLTTTDSEKKVVQPQQKDYYTELLDQWNSIIAGNDAYDKTNPDMVTFHNKAEKDAQNIIKSYQGPDHENRTYLWEHAKDYSASTNITKTYRNIEKIAKQITNPESCYYQDSKAIAIVKDGMAFMYEHAYNLDRENHQTTGKENKENWWVYEIGTPRAINNTLSLMYPYFTQEEILKYTAPIEKFVPDPTRFRVRAANFSPFEANSGNLIDMGRVKLISGILRKDDLEISDTIKAIEKVFTLVDEGNGFYQDGSLIDHVVTNAQSPLYKKGIAYTGAYGNVLIDGLSQLIPIIQKTKSPIEADKMATIYHWINHSFFPIIVRGEMMDMTRGRSISRFNAQSHVAGIEALRAILRIADMSEEPHRLALKTRIKTLVTQGNAFYNVYDNLKTYHDIKLMKELLSDTFVPVQKLDSYVASFNSMDKLALYNNKHDFAFGLSMFSNRTQNYEAMNNENLHGWFTSDGMFYLYNNDLGHYSENYWATVNPYRLPGTTETEQKPLEGTPENIKTDYQQVGMTSLSDDAFVASKKLNNTSALAAMTFTNWNKSLTLNKGWFILGNKIIFVGSNIKNQSSHKAYTTIEQRKENQKHPYCSYVNNQPVDLNNQLVDFTNTKSIFLESDDPAQNIGYYFFKPTTLSISKALQTGKWQNIKADDKSPEAIKEVSNTFITIMQNHTQDGDRYAYMMLPNMTRQEFETYISKLDIDLLENNDKLAAVYDHDSQQMHVIHYEKKATMFSNHNLSHQGFYSFPHPVKQNQQ

SEQ ID NO: 443 - protein, 556 aa, Streptococcus pyogenes serotype M12 (strain MGAS2)
  hyaluronan lyase
MVYFYLVNQSTFIISFLYWRNLSVNTYFCTHHKQLLLYSNLFLSFAMMGQGTAIYADTLTSNSEPNNTYFQTQTLTTTDSEKKVVQPQQKDYYTELLDQWNSIIAGNDAYDKTNPDMVTFHNKAEKDAQNIIKSYQGPDHENRTYLGNMQRIIPLLLISRKLTAILKKISKMKSLMEDSTISTNGLTQQLKIYNDMDRVTYHNKGLDFAFGLSMTSKNVARYESINGENLKGWHTGAGMSYLYNSDVKHYRDNFWATADMKRLAGTTTLDNEEPKSTDVKKSSKTFVGGTKFDDQHASIGMDFENQDKTLTAKKSYFILNDKIVFLGTGIKSTDSSKNPVTTIENRKANDYKLYKDDTQTTNSDNQETNSLFLESTNSTQNNIGYHFLNESKITVKKESHTGKWSDINKSQKDIQKTDEYYEVTQKHSNTDSKYAYVLYPGLSKDVFKSKASKVTVVKQEDDFHVVKDNESVWAGINYSDSAKTFEINNTKVEVKAKGMFILTKKDDNTYECSFYNPESTNSVSDIESKISMTGYSIINKNTSTSNESGVRFELTK

SEQ ID NO: 444 - protein, 635 aa, Streptococcus pyogenes serotype M12 (strain MGAS2)
  hyaluronan lyase
MAFMYEHAYNLNRENHQTTGKENKENWWVYEIGTPRAINNTLSLMYPYFTQEEILKYTAPIEKFVPDPTRFRVRAANFSPFEASSGNLIDMGRVKLISGILRKDDLEISDTIKAIEKVFTLVDEGNGFYQDGSLIDHVVTNAQSPLYKKGIAYTGAYGNVLIDGLSQLIPIIQKTKSPIEADKMATIYHWINHSFFPIIVRGEMMDMTRGRSISRFNAQSHVAGIEALRAILRIADMSEEPHRLALKTRIKTLVTQGNAFYNVYDNLKTYHDIKLMKELLSDTSVPVQKLDSYVASFNSMDKLALYNNKHDFAFGLSMFSNRTQNYEAMNNENLHGWFTSDGMFYLYNNDLGHYSENYWATVNPYRLPGTTETEQKPLEGTPENIKTNYQQVGMTSLSDDAFVASKKLNNTSALAAMTFTNWNKSLTLNKGWFILGNKIIFVGSNIKNQSSHKAYTTIEQRKENQKHPYCSYVNNQPVDLNNQLVDFTNTKSIFLESDDPAQNIGYYFFKPTTLSISKALQTGKWQNIKADDKSPEAIKEVSNTFITIMQNHTQDGDRYAYMMLPNMTRQEFETYISKLDIDLLENNDKLAAVYDHDSQQMHVIHYEKKATMFSNHNLSHQGFYSFPHPVKQNQQ

SEQ ID NO: 445 - protein, 828 aa, Streptococcus pyogenes serotype M12 (strain MGAS9)
  hyaluronan lyase
MVYFYLVNQSTFIISFLYWRNLSVNTYFCTHHKQLLLYSNLFLSFAMMGQGTAIYADTLTSNSEPNNTYFQTQTLTTTDSEKKVVQPQQKDYYTELLDQWNSIIAGNDAYVKTNPDMVTFHNKAEKDAQNIIKSYQGPDHENRTYLWEHAKDYSASTNITKTYRNIEKIAKQITNPESCYYQDSKAIAIVKDGMAFMYEHAYNLNRENHQTTGKENKENWWVYEIGTPRAINNTLSLMYPYFTQEEILKYTAPIEKFVPDPTRFRVRAANFSPFEASSGNLIDMGRVKLISGILRKDDLEISDTIKAIEKVFTLVDEGNGFYQDGSLIDHVVTNAQSPLYKKGIAYTGAYGNVLIDGLSQLIPIIQKTKSPIEADKMATIYHWINHSFFPIIVRGEMMDMTRGRSISRFNAQSHVAGIEALRAILRIADMSEEPHRLALKTRIKTLVTQGNAFYNVYDNLKTYHDIKLMKELLSDTSVPVQKLDSYVASFNSMDKLALYNNKHDFAFGLSMFSNRTQNYEAMNNENLHGWFTSDGMFYLYNNDLGHYSENYWATVNPYRLPGTTETEQKPLEGTPENIKTNYQQVGMTSLSDDAFVASKKLNNTSALAAMTFTNWNKSLTLNKGWFILGNKIIFVGSNIKNQSSHKAYTTIEQRKENQKHPYCSYVNNQPVDLNNQLVDFTNTKSIFLESDDPAQNIGYYFFKPTTLSISKALQTGKWQNIKADDKSPEAIKEVSNTFITIMQNHTQDGDRYAYMMLPNMTRQEFETYISKLDIDLLENNDKLAAVYDHDSQQMHVIHYEKKATMFSNHNLSHQGFYSFPHPVKQNQQ

SEQ ID NO: 446 - protein, 828 aa, Streptococcus pyogenes serotype M28
  hyaluronan lyase
MVYFYLVNQFTFIISFLYRRNLSVNTYFCTHHKQLLLYSNLFLSFAMMGQGTAIYADTLTSNSEPNNTYFQTQMLTTTDSEKKVVQPQQKDYYTELLDQWNSIIAGNDAYDKTNPDMVTFHNKAEKDAQNIIKSYQGPDHENRTYLWEHAKDYSASANITKTYRNIEKIAKQITNPESCYYQDSKAIAIVKDGMAFMYEHAYNLDRENHQTTGKENKENWWVYEIGTPRAINNTLSLMYPYFTQEEILKYTAPIEKFVPDPTRFRVRAANFSPFEANSGNLIDMGRVKLISGILRKDDLEISDTIKAIEKVFTLVDEGNGFYQDGSLIDHVVTNAQSPLYKKGIAYTGAYGNVLIDGLSQLIPIIQKTKSSIEADKMATIYHWINHSFFPIIVRGEMMDMTRGRSISRFNAQSHVAGIEALRAILRIADMSEEPHRLALKTRIKTLVTQGNAFYNVYDNLKTYHDIKLMKELLSDTSVPVQKLDSYVASFNSMDKLALYNNKHDFAFGLSMFSNRTQNYEAMNNENLHGWFTSDGMFYLYNNDLGHYSENYWATVNPYRLPGTTETEQKPLEGTPENIKTNYQQVGMTSLSDDAFVASKKLNNTSALAAMTFTNWNKSLTLNKGWFILGNKIIFVGSNIKNQSSHKAYTTIEQRKENQKHPYHAYVNNQPVDLNNQLVDFTNTKSIFLESDDSAQNIGYYFFKPTTLSISKALQTGKWQNIKADDKSPEAIKEVSNTFITIMQNHTQDGDRYAYMMLPNMTRQEFETYISKLDIDLLENNDKLAAVYDHDSQQMHVIHYEKKATMFSNHNLSHQGFYSFPHPVKQNQQ

SEQ ID NO: 447 - protein, 522 aa, Streptococcus suis
  hyaluronan lyase
MGFFISQSKQHYGIRKYKVGVCSALIALSILGTRVAANQLPSTETASPQSSQLVETTPETTEAVNLTTEAVMTSEVSSEVSPVTSTETQPSSTAAETLASPQAVQATKEEEKNLVANGEFASTTAASGNWADPAATNWETWIPANVKKENGQVRIDEGRLHISSTASYRVAVHQTVDVDPNKRYLFSYNVETKDLKGSGVRVRLRSLTAEGKDLSPQEFAYTPYKNGSQAEHIEQILTVSPETRKLKVELFFENSVGQAWLDNISLVEYVEKTPETPEPSLELVQPETGQISLASNKVYLPVRPDLTYRIADAAVAIVEKNMIRPLAAGKTQVDVYDKDTKLSSFELTVTEHQATVFDTLRNNWEDISLANKRYQSNDTQMKAFLGRLDAGVASSLKKWVEPTNQGKTIFNDIDFSKSSHLTTVYRRLEQMAQVVENPDSAYYHDRSLIDLVRKGMNWLYTNVYNENKSIDGNWWDYEIGTPRAVVNTLIYMHPYFSQEEILTYTKPISKFVPDPTTISVKH

SEQ ID NO: 448 - protein, 1164 aa, Streptococcus suis
  hyaluronan lyase
MGFFISQSKQHYGIRKYKVGVCSALIALSILGTRVAANQLPSTETASPQSSQLVETTPETTEAVMTSEVSSEVSPVTSTETQPSSTTAETLASPQAVQATKEEKNLVANGEFISTTAPSGNWKELAATNWETWIPANVKKENGQVRIDEGRLHISSTASYRVAVHQTVDVDPNKRYLFSYDVETKDLKGSGVRVRLRSLTAEGKDLSPQEFAYTPYKNGSQAEHIEQILTVSPETRKLKVELFFENSVGQAWLDNISLVEYVEKTPETPEQSPELVQPETGQISLASNKVYLPVRPDLTYRIADAAVATVEKNMIRPLAAGKTQVDVYDKDTKLSSFELIVTEHQATVFDTLRNNWEDISLANKRYQSNDAQMKAFLGRLDAGVASSLEKWVEPTEQSKTIFNDIDFSKSSHLTTVYRRLEQMAQVVENPDSAYYHDRSLIDLVRKGMNWLYANVYNENKSIDGNWWDYEIGTSRAVVNTLIYMHPYFSQEEILTYTKPISKFVPDPTTIRKTLTNPVPAVGGNQTDLSKVAILEGALREDADRVRAGAQGLTTIMKFVDKGEGFYRDGSFIDHTNVAYTGAYGNVLIEGFSQLLPVIQPTEFALKEEQTNILYEWIEKAFMPILVRGELMDMTRGRSISRATGESHVQAMEILRSLVRIAESAQPEQKTKLLSFVKAQLTSDTFYDSYRSLKSYKDIDLVNKLLADNQIPAEVDKDYIAAFNNMDKFVYRSAQEGFTFALSMYSSRTQNYEDMNNENRKGWYTADGMVYLYNDDLSHYSNHYWATVDPYRLPGTTTTKDKREDGSGEVTLASDFVGASQLGNRLATIAMDFNNWNNSLTARKAWIVLGNKIVFLGTDIQHQSAQGAETTIENRKLLTGEKYSYYINGQPVDLSKEVVTDKTQSFYMTNGKDNQSIGYVFLNQLPTHAKLDQRTGKWSDINYNQSKEEVSNSFVSLWHEHAQTSSNYAYVLVPNQSMEKVNQAAASVKLLHQDRDLQVVYDQEQNVWGVVKYTDTAYKLTDDITLTDAGLYTIQKVEGGYRIAFYNPSTRTVKNGIELTKAGSSLTVEMEPTAAYPSTVWKVTMPEGSDKQTGSVEKTEKEEKQLKENQPSSEVKQVVHHAAEKTKPSKPRLPQTGEEASLGLGFLGLLTLGAVVDFKCRRSHS

SEQ ID NO: 449 - protein, 1164 aa, Streptococcus suis
  hyaluronan lyase
MGFFISQSKQHYGIRKYKVGVCSALIALSILGTRVAANQLPSTETASPQSSQLVETTPETTEAVMTSEVSSEVSPVTSTETQPSSTTAETLASPQAVQATKEEKNLVANGEFISTTAPSGNWKELAATNWETWIPANVKKENGQVRIDEGRLHISSTASYRVAVHQTVDVDPNKRYLFSYDVETKDLKGSGVRVRLRSLTAEGKDLSPQEFAYTPYKNGSQAEHIEQILTVSPETRKLKVELFFENSVGQAWLDNISLVEYVEKTPETPEQSPELVQPETGQISLASNKVYLPVRPDLTYRIADAAVATVEKNMIRPLAAGKTQVDVYDKDTKLSSFELIVTEHQATVFDTLRNNWEDISLANKRYQSNDAQMKAFLGRLDAGVASSLEKWVEPTEQSKTIFNDIDFSKSSHLTTVYRRLEQMAQVVENPDSAYYHDRSLIDLVRKGMNWLYTNVYNENKSIDGNWWDYEIGTPRAVVNTLIYMHPYFSQEEILTYTKPISKFVPDPTTIRKTLTNPVPAVGGNQTDLSKVAILEGALREDADRVRAGAQGLTTIMKFVDKGEGFYRDGSFIDHTNVAYTGAYGNVLIEGFSQLLPVIQPTEFALKEEQTNILYEWIEKAFMPILVRGELMDMTRGRSISRATGESHVQAMEILRSLVRIAESAQPEQKTKLLSFVKAQLTSDTFYDSYRSLKSYKDIDLVNKLLADNQIPAEVDKDYIAAFNNMDKFVYRSAQEGFTFALSMYSSRTQNYEDMNNENRKGWYTADGMVYLYNDDLSHYSNHYWATVDPYRLPGTTTTKDKREDGSGEVTLASDFVGASQLGNRLATIAMDFNNWNNSLTARKAWIVLGNKIVFLGTDIQHQSAQGAETTIENRKLLTGEKYSYYINGQPVDLSKEVVTDKTQSFYMTNGKDNQSIGYVFLNQLPTHAKLDQRTGKWSDINYNQSKEEVSNSFVSLWHEHAQTSSNYAYVLVPNQSMEKVNQAAASVKLLHQDRDLQVVYDQEQNVWGVVKYTDTAYKLTDDITLTDAGLYTIQKVEGGYRIAFYNPSTRTVKNGIELTKAGSSLTVEMEPTAAYPSTVWKVTMPEGSDKQTGSVEKTEKEEKQLKENQPSSEVKQVVHHAAEKTKPSKPRLPQTGEEASLGLGFLGLLTLGAVVDFKCRRSHS

SEQ ID NO: 450 - protein, 802 aa, Vibrio fischeri (strain ATCC 700601 / ES114)
  hyaluronan lyase
MYMIKKHRLNTIALSMLFLFTGNAYAAKNTQTPQYLPSDFEQVRENWAENYLGDPAITFDQTLKNMVTSTNSSAQKHWDSMTPQPNASGIWDDLPLIDKDTTLGPNIRNSYQRLFTMAKAYRLRDGNLENNQLMLNDIMTAMNYINQNFYFVNQLEYGNWWQWELAIPKDIHNILVLLFDDIKDNYQTIITNHLNATRYFTPDPTHLGVSPGAAESTNPNYRESTGGNRTDNAQVVLIRGMLENNSEEISQAIAALPAVIEYVSEGDGYYTDGSFLQHSDIAYNGTYGNVLLGGLGIQMNAVAGSPWSMDNQTISNVYNIINQSYEPLLYKGAMMDMVNGRSISRSAEQNHDVGLNIVNSMLFYTNGPDSDKNKQLSSLIKTQITDDTYQNFFDKIYYVSTYQAAQHIVNDPTVSLKDPLIGNFSYPSMDRIVHRRTDWAFALAMHSYRIGNYECMNGENLKGWFTGDGMIYLYNDQLDHYTGYWPTVNASRMPGTTVDSQIMADCSGERVGGNVNTNMQWVGSTSLNNYGIAGMQFYNWSDTLSAYKSWFMFDNEVVMLGSNIKDQSNANNITTIENRKRLAETKLFIDGTEQAALPYQGAPATFSIRNKTLANSDLSYVMLTPKTISISQNDVDGNWSDIGNSKGDVSDSYLQATLTQVDQADYQYALLPNQNNDTVQNYAQHPDVTVLRQDEQAHAVQENTLNIIAANNWKNNPVNITDTITLNSMMGFMIKEESSNTFTVAVSEPIQTIDSVNFTFDKQGIVIKEDIENRVVLNGTTLTINTSGLQGQSYSFQVTIQD

SEQ ID NO: 451 - protein, 517 aa, Synechococcus sp. (strain RCC307)
  hyaluronan lyase
MGAPAIPKVPRSPSKSEHTTRPNSGESEVVRQAEELFEQTLVNVRGQLAGAVAALESSVHDSELNYGEIFLRDNVPVMVYLLLRGRFEIVRHFLDLCLELQSRSYRTRGVFPTSFVEEDDKILADYGQRSIGRITSVDASLWWPVLCWMYVRASGDTSYGTSPKVQRAVQLLLDLVLQPSFYEPPVLFVPDCAFMIDRPMDVWGAPLEVEVLLFGCLKSCCQLMSLVEGGGHGGPLIQQRLELTRTWMRDLRVYLLNHYWVTSKTMQVLRRRPTEQYGDYQSRNEFNVQPEVIPHWLQEWLDDRGGYLIGNMRTGRPDFRFYSLGNALGSLFGLLTGPQQLALFRLVIHNRQHLMAEMPMRICHPPMDQDEWITNTGMDPKNWPWSYHNGGHWPSLLWPMAAAVLMHQRLYPNDDLLLLGQTRTMLEECYWQQLNQLPRQQWAEYFDGPTGTWVGQQARINQTWTIVGFLLLHHLMRKAPQDVKLLDLDDVGPLRLSFQDQHEKSSTDERKSFLKNY

SEQ ID NO: 452 - protein, 1021 aa, Proteus vulgaris
  chondroitin-sulfate-ABC endolyase
MPIFRFTALAMTLGLLSAPYNAMAATSNPAFDPKNLMQSEIYHFAQNNPLADFSSDKNSILTLSDKRSIMGNQSLLWKWKGGSSFTLHKKLIVPTDKEASKAWGRSSTPVFSFWLYNEKPIDGYLTIDFGEKLISTSEAQAGFKVKLDFTGWRAVGVSLNNDLENREMTLNATNTSSDGTQDSIGRSLGAKVDSIRFKAPSNVSQGEIYIDRIMFSVDDARYQWSDYQVKTRLSEPEIQFHNVKPQLPVTPENLAAIDLIRQRLINEFVGGEKETNLALEENISKLKSDFDALNIHTLANGGTQGRHLITDKQIIIYQPENLNSQDKQLFDNYVILGNYTTLMFNISRAYVLEKDPTQKAQLKQMYLLMTKHLLDQGFVKGSALVTTHHWGYSSRWWYISTLLMSDALKEANLQTQVYDSLLWYSREFKSSFDMKVSADSSDLDYFNTLSRQHLALLLLEPDDQKRINLVNTFSHYITGALTQVPPGGKDGLRPDGTAWRHEGNYPGYSFPAFKNASQLIYLLRDTPFSVGESGWNNLKKAMVSAWIYSNPEVGLPLAGRHPFNSPSLKSVAQGYYWLAMSAKSSPDKTLASIYLAISDKTQNESTAIFGETITPASLPQGFYAFNGGAFGIHRWQDKMVTLKAYNTNVWSSEIYNKDNRYGRYQSHGVAQIVSNGSQLSQGYQQEGWDWNRMEGATTIHLPLKDLDSPKPHTLMQRGERGFSGTSSLEGQYGMMAFNLIYPANLERFDPNFTAKKSVLAADNHLIFIGSNINSSDKNKNVETTLFQHAITPTLNTLWINGQKIENMPYQTTLQQGDWLIDSNGNGYLITQAEKVNVSRQHQVSAENKNRQPTEGNFSSAWIDHSTRPKDASYEYMVFLDATPEKMGEMAQKFRENNGLYQVLRKDKDVHIILDKLSNVTGYAFYQPASIEDKWIKKVNKPAIVMTHRQKDTLIVSAVTPDLNMTRQKAATPVTINVTINGKWQSADKNSEVKYQVSGDNTELTFTSYFGIPQEIKLSPLP

SEQ ID NO: 453 - protein, 684 aa, Pedobacter heparinus
  chondroitin AC lyase
PALLIAQQTGTAELIMKRVMLDLKKPLRNMDKVAEKNLNTLQPDGSWKDVPYKDDAMTNWLPNNHLLQLETIIQAYIEKDSHYYGDDKVFDQISKAFKYWYDSDPKSRNWWHNEIATPQALGEMLILMRYGKKPLDEALVHKLTERMKRGEPEKKTGANKTDIALHYFYRALLTSDEALLSFAVKELFYPVQFVHYEEGLQYDYSYLQHGPQLQISSYGAVFITGVLKLANYVRDTPYALSTEKLAIFSKYYRDSYLKAIRGSYMDFNVEGRGVSRPDILNKKAEKKRLLVAKMIDLKHTEEWADAIARTDSTVAAGYKIEPYHHQFWNGDYVQHLRPAYSFNVRMVSKRTRRSESGNKENLLGRYLSDGATNIQLRGPEYYNIMPVWEWDKIPGITSRDYLTDRPLTKLWGEQGSNDFAGGVSDGVYGASAYALDYDSLQAKKAWFFFDKEIVCLGAGINSNAPENITTTLNQSWLNGPVISTAGKTGRGKITTFKAQGQFWLLHDAIGYYFPEGANLSLSTQSQKGNWFHINNSHSKDEVSGDVFKLWINHGARPENAQYAYIVLPGINKPEEIKKYNGTAPKVLANTNQLQAVYHQQLDMVQAIFYTAGKLSVAGIEIETDKPCAVLIKHINGKQVIWAADPLQKEKTAVLSIRDLKTGKTNRVKIDFPQQEFAGATVELK

SEQ ID NO: 454 - protein, 844 aa, Victivallis vadensis ATCC BAA-548
  chondroitin AC lyase
MHRKIVFPLFVLLFTAFAAFAASQPQWKWRQSKYCRITEHAGKKLLTVAIPADAPEISRRNTADTPVGLTCFEGQPIEFSIRLRNSGISRPDNLHNGIKFQLYFRDGNGTERWTQAEIPHEPFPWRRFRFSERIPADATSGTLRLGLQGSSGNVEFDLDSLQIRPLDPELSPVPPTPEQIRECELIESRLRAGLPAQQPPPGPEVKKLLERQNGDGTFRDLDYSARNRSIWPAARHLKRTFELALARATPGHALYRDPAAGEAVRKAVAWWAERQPQNGNWWWNDMYVPKILGNILLLSPELFPDGPRRRAALNVCRQACFLSRYTGNNRVFIAANIFCRALLERNLPVMDRAAAVLSEEIRFAPAEHKTAWSFGGIRADGCYHQHGPQIQFGNYGGEFLANIAYWSNILKETHWELSPEQWRIMRHLTFNGFQWVLWRGRMDLLACGRQLGRNAAETKGERTLNAFAQLRNADPGDRAPYDAALRRNRDGENTLTGNRHFWNSDYMVHRRPTWYASVRMNSVRVRPIEDDTNWDNALGRYFSDGACLVMRSGREYENITACWDWTRLPGTTLPKTPVYTGEDARRFGLKIGGGDLPRWTHSRNWRQLGETGFVGGVTDGERGAAVYTQDLDGVRARKAWFFDRDAIYCLGSGITSTSPYEVATTVNSCLRNGEIQQGDGWFRHDGIGYRGENLKLTAGPRTGDWRYVEGGLTRPVPETKELFTLTVEHGVKPRNASYIYTILPGATPEETAGTPPGRVLRNTPECQAVEFADGVRAAIFYEPGRLDDFETDTPGVFLIGKGTVHAADPTGRHSSFTLKLNGVSRKVPLPAGEFAGQSVKIVLK
